United States Patent Application Publication US 2026/0191916 A1 - sequence listing, part 78

SEQ ID NO: 550 - DNA, 3242413 bp, Ruminococcus gnavus (residues 1,621,208-3,242,413 of 3,242,413)
  source 1..3242413: mol_type = genomic DNA
ccagccgcgtcacagacagaagattttccaccagattgatcagccacatggaatcatcataaattcctttataaagctgtttttgcttctcttcaccaagcgctgacgcactgttcagaagaatccctgcatttcccgaaatactcgtcagaggcgtccgaagatcatgagaaatcgaacgcaggagatttgctcttaactgctcattctttgcctgtgcaagcgcttcttcccgttttctgttatagccctctttttccaatgccagtgcacattcccctaaaatggataaaatcaggttctgttcatagacatccatcatcatcccttccagagcaattccgatcacgccatagaccatgtcttcgtttcggattgccagatacaggcaatgtgcatccggatactgatccattcctgttcctgcgcgttttcgattctcgaacgcccactgcgcagcctgccgttcccgctgctgcaagtataacatcttggctgcaccaggttctgccatacaaaacctgggctcagaaagtattccatcctctgcccgataatatatcacattttttcccatcatgcgcatcagatgccttgcagtctcttcaatcatctcatccgcattcttcgccttctggagcatctgattcgtctccaacaggatgcgggtacgtaaagccatctgctcagcccgatacccctgcttacggatttgtatggtcaaattactgacgatcacggctgcaataaacacagtcacaaatgtcactggatacccgtaatcatacgaaaaaaacgtaaatcttggatctgtaaacaaaaaattaaacaacaacacactgagcagcgaatagcatacgctccatcctctgttgaccgtaatgattgcaatgatcagaacccctaaaatgtatacaataatgatattttcttctgaaaatccaagataccggaataaatatccaattccagttgctataaaaaggatccctgtcattaccagcagcccttttaaaaatctttcccagattttcatctgttcctgtttcatattttcgctcccatatttttcacttcctgtcaaatttaacacttcatatctaaaaactgcatgaaaacttttttggttccattaaaatcttataaagattctttctctgctacactagtatatttaaatatgaagacaatatcaacacattatgacagataaaaataaaaaaacggtcatgccgaatataacatgaccgctgtatactatattatgacagaaaaaaatattgtgctgtcccttttcctattcttcgataactccgccatttgcttcgatcagaccattgatatacgcacttcccagcgcccggtcaaaaagaccatatcccggctttccgctctctccccagatcatgcgtccatgatccggacggaaatatccttcaaatcccgtttcaactagcgccttcacgatcgcattcatatccagagaacctttttgcgtcaagtgacctgactcttcaaacgatgtgtccggaagaatcttcacattcctgatatgcataaagccgatacgccccattgcggaatatttacgcaccattgcagggatatcattgtcaggggagcttccaagcgaacctgtgcaaagacacagactgtttgccgggctgtccacgatcgacagataacgatcaatatttttctcacatgtaatcaccctcggcaatccaaaaatcggatacggaggatcatccggatgtaatgccatcacgacatcgcattcttctgccacagggatcacccgtttcagaaaatattcaatattcgcccacagcccttcttctccaagctctccatatgcccggatcaattcacgcacctcatcctgtgtgtagctggcatcccagccaggcagatggatatcatctttcagtggatccagccctttcagctgatcccagtacatcacaagactggtagatccatcctcagcttctttatccaactgggttcgcgtccagtcaaaaaccggcataaaattataagtaatacatttgattccgtacttcgcacagcgctggatcgactcacagtaattttcaatatgacggtcgcgttccggtcttccaagtttaatctcttctgtgacaggaatagactctaccacatcaaataccagaccatttgccgcacattcatcaaccagatgtttgatgctctcttccggccatacttctcccggcttcacatcatacacagcagaaacaatcgaacgcattcccggaatctgacggattttatcgagtgtgaccggatcactgtctccataccaacgaaatgaactcttcacttgaactacctcctatactcttactttcaccacaattttctttacgtgacaggaaccatttgctgtcattcgtctcggagcatgtccgtcttccggcggcacgattgcaaaatccccggcttttaaaatgacacttccaaaatccgcaggttcctgataaaaaatcagatccttctctgcatcatactccacggacggaatcagattttctaccggctcgtaaccgaaacattcttctccttccactacatattgtacatcgaagtattctttatgactttcaaacggacaatctgcagcatccattgtagaataactctgcacattcgcatacacttcgttcccgtcaatcggtacatttccaaccggcagagcggcaagatcggtatctcttaaaaacgtaaacgcttttttaaatttctcactgagataatcgtatttctcagccagtaaaatatttgtcgtcagcatcttttttcctcctgatttttatcggacaatacttccctgttccatttccagatttcatcatacagaccataagaagtatttttatcataggaatatacaagcagtacgtccagcatatacggagaaacactcagccctgaaagttgtctggcaaatgccattgccgcaatttctgacaggcatgagatcacagaacggttggagaatggttttctccacagctcaattttctctgttctggtaaaaatttctcctgcatattgttcctccactgcatgaaacaattcgtgtgccagcaaaatttccagcaggcgctcctttttaagaagcgggcagccgcactgtttttcaagcgcagccgccttatctacgcagtctgtaaagattgtgatctcatctggctgtacatactgtgcaaacaaaaccacccctcctccggtcggaactttcggcatctttactttcatgcccattttcccggccagaatcttcggatcttcagtcccatatttttcactgatgcgcttcgcccattcccgtccgcaggcatttgctttcacagtgtacgcatctttttcctgtgacgtaaactttcgctccaggggttctcttgcaaatgcatagcgtccccacgcttcttctgtcacaccctccagtgtctgcaccatatctttcaatggaatttccggaaacttttctggttcttcctgtacatttctgcctgccagcgcatccaaaaaccggtttcttttaccactcttgtccatattgctgcatattcccttctattattacagactgtttttcgctcccacaatgatcacatcatcagatggattgatcatctgcatctcaacttccatcagcatcataatcttatccagatcaacagatcctgaaaaatccatcacccgggctccggcgcaaatatagtaatccgggcgcaggatggcatcctgctgataaatcgccagttcttcccacatctgagagaccacattccggtagcttcccgctttacaaagaagagcttttccatcatttctctgcactttgataaatccttttttatccagaatacgaaccggatgttttccttttctgtctgtaccaaatacatagaaattctttgttgcacattcttccttgattgcagaaggttcttcttttaaatcctctgctgccagctgacgtgcttcttctgctgtacattccttcaaaagatcggttgtctttacttctgtggagcccagcgcgatcgctgtcagctttgaagtctgaggatcgatctcgatatgaacatccacactgtccgctgcggcaccactttccactgctttgtcaattgcttctgctttgatcgagcggatatcttccggtgtcgggtttggaaccactcgttccactacatcacgtaccattgcaagtgcaacaccgatggaagaaatgacctctgcattatccggaatggaatagcgaagtcccattttatccgaacagaatccaatcagggaagcggctcctccgccgactcctaccagactgatctgatctttctccaggcgatatttttctgccagttccatgatgatcggttcaattttctcataggctcttgtcagaatctgttctgcaacctcttccactgtttttcccatgtaatctgccagaggctgcattgccttgcgcgccgcattggcatttccataggcaaaatattctggtttaatcagtcccagcacattcgctgcacaggtatttgtgatcgtgatccgctttccgcttttcagttcgatcgctacatagtccgcaggatctccctctttcgggctgaagaatacgactttcggatccacgatttcttcttccggagtaaataccgcatagtccatacctgcaatatgtgcggaacgtggtcccacatctttgacaccgctcttatctgcccgcaccatacttcctccggcaacaccgaggacacgcacatccagactgctgatatatgtacggtgtccgcctacattcgaataatcaatggcaggacgtccgtctttgattacaccgatattcgtcgttgttcctccaacttcaaaatatacaccatttgaggcacgcagatacatcagacttcccatcacagaagctgcaggaccggacaacatcgtaaggaccggacgttttttcatttcactgatctccataacaccgccgtcacctctcatgatcatcagaggaacttctaccccggcgctttttacactctgttctgtagaatttgctgtattgagcattttcggcaaaatggacgcattgattgcagctgtacgtgtacgtctggtcagtccataaagcttggtgatctcactggctgctgtcgcttccagacccatatcttttgcaatcttgcagatgccggtctcattttccatgtcatccacaccgtaagattcactggccacgataacctgtgcaccgtcacccaccagagatttgatcgtatctgtcacaagctggtcagacagattttcatcacagatgaagcggttcttaagccggataaaacgcccggatccaaggttgatatccttcatattcgtctgcgcttttgcgatccagccgcccacacctttcggaccgacaccgatcactcctacatttgccacatctccttcgatcagagcgttggtcgcctgtgtcgtagaatgtgcaacaaagatcacatctttcggatcgattccattttctctcaggcaattctgaaatgcctgtacaactccggtcgcaacccctgccttgtcatcatgtgttgttttcacagaagactttccgataatttcatgggtcgcattgtcgatggcaacggcttttgtatgtgttccgccgacatcgatacccatacgtacttttctatcactcatttgaaactcctccttaaccaaacataatgtaagtgatggcctgcatgatgatacaaacaatccatgcaaccggcaatgtctttttcagatgttctcttgttgatacttttgcgtagctgactccccatgcgatccagctctgtgtcatacagatggaaacattcattgtaatagaaggaatgaccatcagcgcaaacagatatggagttgagaatccgattcctttcaggattcccagtgttgctgctccacaaccgaaaagtgtcagcggtccacggaacaatccaagtggtgctaaaagtgcaaacgcaatactgatcaccagtgtattgtgcggaattacatttccaagcaacgcattaaaataaggaacacaaagttctgctgctttattgaacatcggaatcataagcagaaatccaaccaacggtgctgtatcaactacaccatcataaaaatctttattcagcacacggcaggcaccccggaaagatttcagttttccacaaactgccagtgcataaaaacttccaatgataaatccgagaatgatcggaacattcaatacaaccagcagtaaaaccggaaggatcggtgcgatcagcgcaactgtcggaacatatcccggacgtgcttttcttgcggcggatgcactccatgcatgaacagttttcttctttctcagagaaaacatgcacatcacgatcaccatgatcagctgtacagcaagtccgatccctgcccagcgaagacgtgccggatcatcataggtgatcagctgttttccgtcttctcccaggaagaatgccagaaactgtccggtaagtaccgggttcaagtacattccggctcctacacttaacataaaagaaccgatagaaagtgtcttcggaataccaagactcatcaagatcggaagaatgatcactccaatcgcaacaactgcccctgcaccaaataatgtagagaaaattgccgttgttactgtagaaagcaggacgcagataatgactggtttatctcctccaagctcaacagcctttcgaatcaatgcatctgcaattcctgtctgaagcagtacacgaccaaaccatgcaccaaacacaacattgacaagaacacttccccatccttccggaccggactggaacactttcgtgatcgcatctacaaaactaatgtccgtaattcccggatatgcagcgataaattccggatttgttgcaaaagtatttccaatcagtggaagcactgtccagataatacccatgatcagcatacccatcatcaggttgccgccgcgaactgcgtaaacggcaagacctacaaatgagacgagcagcaggattcctattacatattccatgatatttcctccctagttctctctcttttcttacattttcaggatggattcccaaacttcttcaattaccgggattccctgttctttgttctctttgatatttttcagctccagttctcccggataataaacctctccgccttctttgatcggttccgaagatttgacatctgcaagaatctcttctactatcgcatctgtctcttctactgtattgaattttgtcggatcaacagcgatcatgatctgagtcagtccgatctcatctccaaatgttccgatcttctgtacagaatttccatttgtcagaacggttgcgatcagatcaagcacgatagacagtccgcttcctttccagtatcccattggaaggactctccatgttttttcgatttccgtaggatctgttgtcagctctccttttgtatcatatccacccggcaccggaagctgtacacctctgagacggcaatcttcaatctttccataagaaaactgagaaactgcacagtcaatcatcgcatgttcaccattggaacgaggcactgccatgatcagcgggttgtttcctattttacggttcaagccgccccatgccggcatgttcggcattgtgttggaccagcagataccgatacatccatgatctgctgcgagccatccatatgtaccgcctctcatccagtggttattgtttcctaatgcaacgcatccgactccgtactcttttgccagttcacaggcacgatccattgctttctttgcattcaaaggcccgaatccacgatgcccgtcccatctctcgatggctcccatctgcatttcacaggttgctttcgcattcggatcgatctcccctttttccagatagctgacaacacgcggaaaacggttcaagccatgtgagaacacacctgcaaggctgttctgtgcaaaaataactgctgcattttctgcatcctcatgattgaatccccttttctccaaaactcttgtaaactcctgtaccataacatcatattgaactctcatgataatctcctttcagtttgtgaaaatattttgaaaactcataaaagcgctttctctagctttcattatagttatctgtctgtttttgtcaatataagatatcaactacacactactttcagcatatagtataatttttaaatctgatttttgtgcaaatcgctgatatttttttaacattatgcaagcgttttcttatatttcaaaaaaaataagagaaagactttcagatatttttccaaaaatctttctcttatgcttccgccagcctaagttgtctgtccttccactaactccggctgaattgtgcaggatgaatatacctctgtcttttcaatcagactagtcaacagctgaacactcatcattgccactaattccggcttattatcaattgttgtcaattgcggttcacaaatttttgcatattccgaattattataaccggttactgctacttcctccggcaccttgattccataatgtaaaagcgctttcacaactcctgctgccgtaatatcctctccgcaaacaattcccgtaaatttttgctttctccggatcagctgttcgaccgcttttataccaccttcaatacttgatgcggtctccagcacctgctgtcttgcatttttgagaccacatttctccatctccgcaataaatccttcacatttaagctgtgcactgactgtatccatatctctcagataatagatctcgcggtgtcccttttgaatcagatgttccacagcaagcgatactccatacctgtcatcgaccagaaccgaatatgaatttggcagttccagctttccattggcaagcacaaccggtatattctgcagcaacccgctgatttccgcatttttacaaagcgtattaaacacagaacctaccagtacgattccatccgtctttttctcccgtgctgtccgcagatacttgatcgtctcttccagctccccgcccgtgttgcacagagaaacctcgtatccacgacggctgaactctctctctatggtataggccgttctggcataatgcggaacacggatatccactgttaaaacagagacggtcttcatcgatttgctcaccattccgcgtgcgatcgcacttggcgcataattatttttttccagaatttcttctactttttttcgggtttccggatttacatttcccttatgattcataacccgcgaaacggttgaaatcgaaacccctgcttcttttgcaatatcatatatattcataacttccctctttccaacattccataccttcatgaaagggcttttacaaaagcatacgtgataaagccaagatttgtcaagaaaatttccaacaaaagttcgaagcgctcacttccggagatgggcgtgtttatgcgtcccatccgtatcgatctactttttccggtttctccacctcatatttagtttatacaaaataacgaccagaatgatatatcctaatggcaaaattactgccagtgcaagcacaactgtcagttttgacagctttttctgctctgtttgctctgatttttcagccttcttttcctgttttaccgactcgatctttatttttttatcagatcctgtcaatgcggaaaacgcttcttctgtcaatgttgctttcgcactccccactggctgtccgtgataaaaatactctaccgcagcctgtcttactccttccttttcatttggaacatactctttttccaattctgaaaacgaaacgccctttggaaccacaacataggcatcttccttgtcaaaactttcaatatctgatgaagtttcacattccctcagattcagcctttcaaaatttgtaaatgcataatcatacataaacctcgtatccgtataagcatctactccatatgtatgaagcaccaccgctgccagctgcatatcatttccttccgccatcgtcacaagcgttgtctttgactgatctgtatatccggtctttcccgctttcgcattcgcatagtaataatagttttccggccagagcattttatgattctgatccagaatcctttcttccgcagtcagattcgtcggtggaactttgtattccagcgttgtctccagtcttcgaaactcttcattctgataagctgccactgcaattctcgccatatcatgcgctgttgtatagtggttgtcatcatgaagcccatttgcattgacccagtttgaactggtacatcccaattcctgagatatccggttcatctcttctataaactccgcatatccgccatttaagtactgctttcctacattttccgccaccgcataggagacttcatttgccgaagccagaagcatcccataaagtgctgactccatgctgatttcttccccgggcttcatcccgatctgcgcatcatcccactgcaaaaaagaaatactgtcctctgaaaacacaacggtatcggacattttcgcatactgtaatgcagtcaaaacactcaacactttcgtaatactcgcaggatatcttttttcttcggccttttttgcataaagcactgccccgctgttcatgtccatcacaatgccggaagccgcatagatcgcgggtccctgtggccagttcgaaatctcgtttgtatctattttctccgcataagatgctgctttttcctggttttcctgctcctgtgcagacagtacttgtgtattttccgtctgctcctgcccggccatctcctctgcacacacagccacacccggtgtaagagtcaaaagaatcgctgccaatgctcctgagagaactttctttgctttcataatctgcctccattttgtttcaattggttttattatacgcaaaatggaggttagcgtcaacgcatcagaaatttttaaatctttctaaattttccccgtcttctcttgaggatttttcaaaaacaggatagaataggagcattcggaaggaggatttccatgagttccaagaacaacaacgaacatttttttaatcaggattttgaagtcacttatgaagacgatccgatctttcattatgaagaagaaccactgacaaagcgtgaatttcaaaccgtagatttaaaatcacagccaaagccccgggcttccggtaaaaagaaaaagaatattcaaatgccgctgcagggagacgagaccattttaatggatccgatcacaaatggatccgtttctccacagtccggccggaaaaaccatcaatgggaagaagaacctgacagaagaaaaaatccatcacgttcaaaacgcccgacctctgattctgatgattacgaggatgaacgcccccgcagagaaaagtcttcttccaaaaggaaaagtgacctgctttctcctgtaaaaaccactgcaaaatatgggggaaaagccatttataaaacagccagcattatcatccgtttcgtttctcttttgctgatcgcaggaacagccgctttcctggcttataatttctggcgcggcagtgctccttacggagatcctgtaactgcagtagaagaaaagaattattgtctggccgcttatgccggagtcgccggattttttcttttatttgaatgcatctcctttttatgggctatgacacgggttcgtgtccgtgacggcagaaagacttataaagaagataccggacgtggacttttctcatttatttttatctatgtgtgctcttatgcatccttttggatcaaccagatcattccacagtctccggatgtgttaaaaggaatccgcggtgctctggatgtattcggttccatgcacaacgccctgcttgggctctgtctggcgggagttatttcctgtctggttcgtaagtatgcaaaatagattgagaacgacaaaacgccgccgggggtacatttatctttggcagcgttttttgttttactatttaccattattttaccagcactccggactgcagtatatccctaagcaactgatttgcctctcttttgatctcttcaatcgatgttttctcaccatgtgcctcattgataaatccaagcatcccaaaacacaagaaacctgcaattttcttcggggaatatttcacttctacattctgtcggattttattggtatgattttcaattgtttccagtacaatagtgtaaaatgcagatgcaagatacgggtttttctgcgggctggtatactggaaaaatgcaaaacagtcataatacacttccagaatactgtttaacatattgcaatatcccattacaagatcatttcccggattttctttttcctgttttgtacgatagatatccgttccgatctgaagcatatcactgaaaatatcatctgccagtgcgtatttatcactatagtgtgcgtaaaaagtaattctgctgatttctgcccgcttgcacaattctgtaatagaaatctgctcaaatgagatctctcccatcatttcgatcaaggttgccttcaaatttttcttggttttgatcactcttctgtcttccatgatttacattttcctctttctgtataattaactaacattttacaaatattgttcattgtctttagatttcggatttgctataatcttaacacttgttaaaataacggtcaatatgtaagctattttcgcctttcaccatagaaacggcgggttacggattaagggaggattttatgccaaagatagcaattatgacagacagtaattgtgggatcatgcctgataatgcgcagaagtatcacattcacatacttccaatgcctgtccttgttggggaagacactttttatgaaggatgcaatatcacatcagaagagttttaccggaaactttcttccggagaacctgttacaacttctcagccatcgcctgcggatgtcatgaagatgtgggatcagctgctgaaagaacatgacgaagtcgttcatgttccgatgtccagcggactgagcaattcctgccagactgccctgctccttgcgcaggaggaatatttcaaagggcgggtgcatgttgtggacaatcaccgaatttctgttacacaggcacaatccgttctggatgcagtcgaacttacccgccagagattcaccggggcgcagatcaaagaaattctggaaacggaagccatggatgccaccatctacattgcggtagacactttggaatatttaaaaaaaggcggtcgtatcacagcagcagctgctgccatcggaaccgtattgaatttaaagccggtccttaccattcagggagacaagctggatgcctataccaaaacccggggaatgaaatctgcttttaaagccatgtgcaaagcacttgataaggatctctccggaagactctctgcactccatactcagggactgctcaaagccggtattgcatatacacagatggatcctgatacattggaattttttaaagaagaaatgaaaaaacgatacccggatctggaattgtttcagcttccacttacaatgagtatcggatgtcacaccggtcccggtgcacttggaatcgggctggtacgagtccataaataacacaggcgggaaaagtcacagcattacttttcccgcccgttttctatcttggcttcgcattcggataaatccgatccattctttcatcatcaaaatgttcatcgatcactttttcccagccactctctgccggtcttccattggcacgcatatcatagcgcaccagtgccgccatagataccagaatattcactgccataaacacaaccagaatccaggtcagcacatatccccagagcatcggaatcttttcaatccatcctgcaaatttcggatacaataccttgatccagatcaccgctgcgatcccccagaaaaagcagtacaacagattgatacgcccacccaggttaaacggaatcttactgtagtcccagaatacttttctaaacacaatctctgtaaatacactgcagacatattcatatgctccgcctaaaaatgtacctacaataaaaatatgccggtccggcttttctctgtccttgtataaaagtgccgttgcaatggcaatcgccagcccccatacaatactgaacggtccccatacaaggctgctcctgctcatccatactccggctgtcagacgacagaagatcgtctctgtaaagtctccaagcactgctccgatcaaaaacagccagaatagtttataaaacccgcacccttctgcaaagttcccttctttttctatctgctctgtcttttccatgatcacaggatatgccttcgccattcgtttttctacatgacccacgatcattaatgcaaatttctgcgtccatactgctactttcttattccaccggattgcagtcggcatctctttccggatatgaaatactgctgccagcgatgcagaaatatccagagccattcctgctagcaaaatccagagcagaatctcccggatcagcgtcggaatcatgtgatatactatcagaaaaaaagcatctccataccgtacagccacaaatccgagcactgcccataatacagaatactgtaggcagatgtatccgtcaaaattccatttcttgttcgaatagtcccaccatttgtgctgatttaagcgctccaggatttttcctgccatccactctatgatcgttgcaagcactccacagccgatcagctgaaagacaggctctgccatcagttcttccatcgtgactgccataaatactgctgcgattccatacaccagacagaacggacctgtcgaaaatccacggtttacaaactttttctttttcactgtgccgacaatcgtttcgaccacccatcccagaaaagagtagatcaaaagcagccataccaactccatcattgaatagttcatctatgtttctccacttatctttcgtattttattactacatttactcttcgatttttttcaaaatctcaccaatatctcccatttcttccggcagatcttcttttcgacaataatcaattgacacgatcttgccgggaagctcctgtttgtacggccctgcctgaaccagcactttatctcccactttcagatgttcatcctctgtcagatacggatgcttctctcctttttcatgaaagaccacgctgcagataatctgttctccctgacgtcttccacgacgataaatataaggattcagaatatcttcatagctttcataaaaccggatgtatcccgcgatctcccggataaatgcatcccatccttccggaagtcctctccggttatatgttcctgtcaccacgcggctggtacttgcaccgcattccagggaaagcttaaatgctgcactgtccggctcctgctgaccggaggtacttttcagttttccaagatattccatgcacttatccatcagctccggaatctcatcccgcatatgatattctttggtcaattcccgccccggagcgatcacctgacggatcgtcagagtttcctcataccggtccaggatcatttcttctttataatcccagttgacagtctcattttgagttcccccttcatttttctgcgtgaaccggacatttctctgatattccaaagtgattttattaatctgtccgggaatggaagttggcacgatctcatccatgatcttcaaaaattctttccagttatccggataaacgccgcgtcccacagattttttctccttctcgccctgttcacaatatgccacttcccagttctcatcatcttcatcaggtatagcatctgacggcatatagacctctttccagttttccatatgtaaatctgcaatccgcagaagccactcttctccatgctctgcggtcagtgaatacgcgcattcaaaaaatggataggacacactctctatcactgcatccagcctgcagtctttcgcagtacgaatctctatcaatgtcttgttttcgccttttctggtcgaaaaacgaatataattcaacatctcaccaatgttctcctttgctgtcatttccgacttgtgatcatgccggatttcatcattatatcacaaaaataccagagatgaactcttttgcacagaaattcatctctggtatccctatccggatcctattcgtcactgtttccagcagctcctattccatataaccgcccttcatcggagacacggccttttccgcaaactgctttaaaacaccttttgtatatttgttttctcttggctgccagcggctttttctttcttttaagattgcttccatttcttcctctgattttctctcaccatttactcccacgattcgaagaaccctgtttgaaatgctgatctcaatcagatcattttcttccaccagggcaatcggtccgccctgtgctgcttccggagaaatatgtccgatcgcaggacctttggatgctccggaaaatctaccgtctgtcagaagcgcaatacttgcaccaagcgttgcatctgatgcaattgcttctgtcgtgtaaaacatttccggcattccgcttccttttggaccttcataacggataatcaccgcatcgcccggctgaatctcatgtgtcagtactgcatggatcgcatcttcctcacagtcaaacggtcttgcccgaagaactgcttcaaacatctcctttggcactaccgtgtgttttacaacggctccatccggtgcaagatttcctttgaggatcgcaatgcttccatctgttccgaatggtctgtcaaacggccggatcacatcttccctctttaaattccactggtccaggtaactctggcatttatcgtagaatccatttttcttcagttcttccagattttctcccagtgtttttccggtcactgtcataacatccagatgcagcatatccttaatctcttccatgatcgtcggaactcctcctgcataatagaagaactgtgccggccattctcccgccgggcggatgttgagcagatagtgtgcgcctctgtgcagacggtcaaatgtatctgcgtcaatctcaattccaaattccctggcaattgccggaatgtgtaacagagagttggtagaaccggaaattgccgcatgtaccatgattgcattttcaaaggacttcatcgttacgatcttgtccggagtcaggttatgctctgccagccagactgcctgttttccggctttttttgcaaactctcttaagtccttgctggttgccggcatcaaagcacttcccgggagcatcagtcccagcgcttctgccattacctgcattgtagatgctgttcccatgaacgaacatgctccgcaggatggacatgcattatgtttgtaaaattccatcttttcttttgtgatctctccacgttcacacattgcattgtactttccaatctgctccagtgtgagaagatccggaccggcatccatcacgccgcctgtcacgataatagacggaatattgattcttcctaccgccatcaaatgtgccggcattcctttatcgcagcttgcaataaacactccaccgtcaaacggagttgcatttgcatgaatttcaatcatatttgccatcatatctctggacggcagtgaatagttgattccatcatgtccctgtgcttctccgtcacagatatccgtacagaaataacgagctccgaaaccacctgcctctgcaacaccctgtcttgcctcttcgaccagatccagaagatgtccgcttcccggatgactgtctccaaatgtactttcaatgataatctgtggtttggagagatcctccagcttccatccggttcccagtctcaaaggatccagctccggtgcgatttttcttaatttctgacttgtcagttccatcttaattttcctccattctgataacatttccctgttccaaatattgaatcaaaatttttgcatcttcgtcctccacccgcatttttacatcgtcaaagcaaggaaggctaaacacgcccagcattgattttgcatctaccacataacgtccgcagagcagatctacttcttttttgcaggcttctgccgcctgcacaagatgttttgcatcctgcatatctctcaaatatacgggtatgatcttcatatacgctcctcctttattatgcgaagatccagatcaccaatcccaaaatcagacctgtgattccgatcagtgtttccatgatcgtccatgattttaatgttgtcttctcatcaatctccaaaaatgtacttaccagccagaatccggcatcatttacatgactcagtgccgtcgctccgccacagattgcacagcacatcgctgctctgtacagtgtagagctgtctgccatagccggcattgacgccatgatcccggaagccatcgtcattgctacgattgaacttcccacagaagcacgtaccagaaacgcaatgagaaatgcgatcacgatcagcggcattccgcttttttccaggatcggtccaataatatttccaagtcccgaatcctgcagcatccagcgaatcactccgccgcttgcgattacaagcaggatcattccaaccggtcttaaagagtgatccagaatctttttcagctgatctctgttataccccattcttgttcccagcatgtacatcgctgtcagagttgcgatcgtcagtgccacaaacggttctcctaaaaactgaagaactgactgcacactttccggaatcggaagatatcccgagatcgtgctgagcaagatcaaaacaagcggaattaaaatgatcattaatacaattccgaaggatggaagatttttatctatatctgcaatttcctctacattcgcaggaagtttggtatagattttatttcctatgatttttccccagataattcctgcaaccactgtggaaaccagtgcaaccggaattccgatcgccatcatcgtccctaaattcacacccaatgcgtttgcaaccagaacagaacctgccgacggcggaacaaaggcatatccggatgccagccctgccaaaagaggggttgcataatataacgttgatttttttgtctgctttgccacattgaacgccagcggaatcaggatcacgactcctgcttcaaaaaatacggttgtgccgagcacaagccccgtaagtcccaatgcccatcctgctttttgctgaccaaatctgcgaatcagcgtctgtgccatctgctgagctcctccactgacttcaagaattccgccaaacatggatcccaatccgatcaaaagtgcaattccctgcaacgtctttcctacgcccttttctaccgtctctccgatcatatgtaacggcatacctgcaccaattccgatcagtacagcggaaatcatcatagaaatcaccggatgaagcttcagcttgatgatcaaaaataacaataaaagaattcctgctgcggatgcgatcaataagcgcatcggatctgcataaaatactggttctgtcatcttcccttcccccttacattcatcatatgttttccttgtttaatacatctgaccattttactactttttctcctttttccaaagattttctttcaaatgccttgaattcatctgatgattttattctaaaatctttaaaccagaaaatcaacccgtaatatttcacaatttatttacttgttttttgtgtatttttattgtttgacatttgttttttcttattttatcctgtatttattgcgttatatttgtagaaaagaggaaaagtcgtatgatgaattcaactgaaaagagtttacccgagaagttatctgacgatatcattgcctatattttagaagagcagctccagcccaacgacaaacttcccaatgaatccgttctctctgaaaaaatgggagccggacgaagctccatccgggaagccatgaaactgctcgcatccagaaatattgtaacaatccgtcagggttccggaacatatgttgccgcctcccccggagtcgttgacgatccgcttggatttacctttattgatgacaagaaaaagctgacactggatcttctggatgttcgttttctgctggagcctgccattgccgaaatggcagccctgcatgccgaagagaccgatatccgcaagatctctacgctgtgtgatgaagtcgaagcactcctccttcgtggggaagatcacactggaaaggacattgagtttcacactgccattgccatgagcagtaaaaatctggtcgttccgcggctgattcccgtaatcaacagctcgatcccgctttttatccaactgacaaacaatcggcttttacatgaaacgattgaaacacaccgggagattgccgatgcgatcgcagctcacgatgcactgcgcgccaaagatgccatgtatctgcaccttgtatataaccggcgatgtcttcttgatcagaaagcataaaaaaagacagtcattcctgttcttttgggaatgactgtctttttcatcagtctttaatgatcagtgccatgaacacaagatctgtatcaccggtattggtcagtgcatgtccgcatccatccggtgtaaatgtcacatcaccggcttttaccgggcggattcttccattgtcgtcataattgccctctccggtcaggatgtaatacgtctcactttctccatgatgttcatggtaaccaagggaacatcccggctccagagtcacttccgcgtaaagcccgcactttccattcagctctttttctccgagaatatgcttgatcagcacatgcccctttccaccgcacattgcttccattctttctgtgttcattcttatcacctcgtttggatttttcttctgttattatactgcattactcgtcaaattccaagattacgaaatcaaaacgtgacgtttttctcgtatccacaacggttcctgtcgttgtctttaaacgctccgcattcttaaaatttttactgatacccagagcatgttccagcacataataataggaggacggaagtacgcactctgtcacctcatatgtctctcccggctgaaatgattctacatgctccgttgtaaagtccattcttctcatctataagcctcgctcttattgtttatataaatgatttctgtgattccataaaaagcatccgccgccaaaaagcccaaagaccagtcctgcatagattccggcacagatcagatcactcagcctgcatatcacgttcatatgtttgatgatacagaccagaattcctgccatcgtaattccaattgtccagatcagcattgcagaagtcagaaatactgccattctggaattttcttccatgtattttgtgatcagtttccataatcttgtatacatattgattcctcacaatctttttctcatgttcttatccaacatttattgtaaggatgttatgttaaatctataccgggttctgacaaaattttttgttaaactgatccgttcattcccttcccagtattttttccgtaatctttgccggcgtactcacaatccagtcagcgcctgcatcttcaagctccgctctgtcaccatagccatacaagactcccaatgcagatactttgcatgcctttgctcccaagatgtcatgttctctgtcaccgaccatcagcaccgactgcctgtcttctactttacagtttttcagcacatactcaatgacttctgcctttttcgtacggcttccgtccatatttgcgcctccgataaactcaaaatatggcgcgatcttaaaatgctctgcaatcttccttgcatatttctccggcttggatgtcgcaactgccagacggattcccgcattttttaactgttccagtacttccgggatgccatcataaacagaattttcaagcatccctttttcttcgtaatattcccggtaaaattctaccatctgatgccctttttcatctgaaaacccgcagaattttgcaaactgctgtgcaagcggcggtcccacgaagcatttaagctcttccagattttctgcgcccctaccgatttttttcaatgcatactggacactgttcatgattccgagaccagaatctgtcaacgttccgtccagatcaaacaggacaagttcatactgatatgccatgttctcctccttctaaaagctgcggatcttgtctgcatcttcatcctgtgtattctctatttttttaatcactacatgataaccgaactcatcatttactttgacaaatacccgatctccgactttgtgtcccaaaagggctttaccgatcggtgattcaatgctgatcagtccgttcagggagcttcctctcactgaagttacgatccggtacgtctccagctcgtcatcatcctcacagtatacctgaacagtattgtttaatccaacttcatctgcaccggaatggtcctctacaataactgcagtctttaacattctctccagataacggatccggctttcatttctgttcttctcttttttcgccgcatggtattcaaaattttcgctcagatctccgtgagagcgtgcctctttgaccgcttcaatgagttctttacgctctaccagctttctatgttcaatttcctgctgaatctttttgacatcactttgggtcagtttctctctcataatatgcctttcttacaaagcaggcagaagcccgaaaaaattccaaacctctgcctgctgtatctttcctgtatttctattcctgttgaaataacctgttctctgcgattattttacaagcagagattttcctgtcatttcttttggctgctccattcccatcagctcgatcagtgtcggagcgatgtctgccaggcatccgccttctctcagtttgtaagccgggtctgcattcacaagaataaatggtaccggatttgttgtatgtgctgtaaacggctcgcctgttgtctcgtcgatcagctgttctgcatttccatgatctgcacagatgaacatctgtccatccacttctttcagtgcatccactgcttttcctacacactcatccactgcttcgatcgctttgatcgctgcatcttctactccggtatgtccgaccatatccggatttgcaaagttgataatgatcacatcatatttgtcagatttgatcgcatctaccagcttatcacatacttcatatgcactcatctccggtttcagatcgtaagttgccacttttggagattttacaaggattctgtcttctcccttgtttggttcttctactccaccgttgaagaagaatgttacatgtgcatatttttcagtctctgcaatacgagcctgtgtcatgttgtgtgctgccagaaattcaccgaatgtatttgtgatttcttcttttacaaatgctacctgcttattctggatcgtcacatcatactctgtaaagcatacaaatgttgtcttgactctctctcctctgtcaaatccttcaaagttatcatcacagaatgttcttgtgatctctcttgcacggtctgggcggaagttgaagaagatcacagaatctccatcttttacagttgccaccggtgcaccgtcttttacgatcaccattggttctacgaactcatctgtcttatctgcatcgtaagaagcctgaatccctgctgtcgcagattctgcctgtacgccttctccttttaccagtgcattgtaagctctctccacacgatcccagcggttatctctgtccattgcatagtaacgtccgctgacagatgccacttctccgacgccgatctctttcatttttgcttccagagcttctacataatcttttccggatgccggcggagtgtcacgtccgtccaggaaacagtgtacatacactttttctacaccctgtctctttgcaagctccagaagtccgtaaatatgtccgttatggctgtgtacaccaccgtcagaaaccagtcccatcatatgaagagctgtattgttctcttttgcatttttgcatgctgcaagcagcgcctgattctcaaagaaatctccatcttcgatcgcttttgtgatctttgtcagttcctggtaaatgatgcgtcctgctcccatgttcagatgtcctacctcagagtttcccatctgaccttccggaagtccgactgccattccacttgcatttccttttacaaacggatactctgccatcagtttatccatgaccggagtctttccttctgccacagcatttccttttgttgtatcattcagtccatatccatctaagatcatcaatacggttggttttttactcatgtccatatctccttttactttatctgtgaatttgtaattcctgtatggaatttacctctttcattccgtagactattgtaaccgtttttccctgattttgcaaatatctttcttatgaatttgcaaactcatcgatatccatttcatccttctgcctgatttcatccagaacccagtgtccgttcaggtgaataaatttccagtattcatagaacgcttcatttttcctgcttccgcgtatcatccttcccgtcttttcatccaccacataatcgatcatttttccgtggatcaaataccagatataatcctgatctttccccagatcgtcaaatgtatgtaccggcaccgcacttaaaagccgttcatttttctgcaccggaacttcatttcgaacctgcatccaccccagcttcattacaaaatcatcgtaacatttctgactcatatagtcctttgcataatccggatcctgacgcttccagcattcctggatcacaaaatatgcattcttcacctgctcctggatctcattgatatcccagttgtccccaaactgctgatactgcctcatctcccggtagcttttggaagatgcccttctggatttgacaaaaaacagtacgactcccgcattcgccatcaggaaaaatcccccaaacatgacaacactgcttaccggactggaacttctgccggtacggttggaatgcgaactgtaataactgccgcctccggaactaaagcctcctccgcctccggaagaaccgccgctggctcctcctgctcttgcctctgctctcatgggactgcatatgcacagaaacatcagagccagaaacagaagtacctttttctctttcatacgcatggataaccaccctctcttttcactcacgcttcctttggatcatatgatttgattataccatttgaaagctgtaccgtcatttattttctgatttttgagggaaatattttatcctttatttttctgtcagctccatattccagaatattacattcataaggatcacaaccacgatcacaactgcaatcgatacccagaatcccatatcgagtcccataaacttcgttgttccaaacaattttatccaaagatttgtccagttcatccttcattcctccttttacagcaattctccataatgacgcacatatgcttttttcaaacttgttgccagcaccatataaagcaggatgcacggaatcagatacgcaaaatatgccgtcggcagtgccacaaatcccaacattctgccaaatgtagtaaatggaatgatcgtcagcactccgattcctgtaaatgtcatcagcgtcagtggtgcagatgcatggctttgaataaacggaagttttggtgtgcggatcatatggatgaccagagtctggctccacatagattcgataaaccatcccgtctgaaacattgcaacataagccgtctgcatccgtaccaaatctgcgccggcaaaatgactggcaagatcattgtacagcactcccctggaaacaaagagtggacaaaatacaaagtacataaaaatataagtcatccagtcaaaaaccgaacttgtcggtccgatccacatcataaagctgcccacactggacgcatcccatttgcggggtacagaaataaactcttcgtccacattatcccatggaattgcagtacaggaaaggtcatagatcagattcaaaaagatcagctgcaggctctccatcggcaaaaacggaagcagtgccgatgccgccaatacggaaaacatgtttccaaagttagagcttgccgtcatcttgatgtacttgatcatatttgcatatgtcttgcgtccttcaataattccttcttccagaaccatcagatctttttccagcagcacaatatctgcggattctttcgccacatctactgctgtatcaacagaaattccaatgtctgcggatttcattgccgaagcatcgttaataccatctcccataaagccgactgtatggccattttcacgaaatacagacaccactctcgctttctgatccggtgtcagctttgcaaaaacatctgtagtttctgctgcttttgccaattcctgatcactcatgttctccagatcggaaccaagcagcatatttcttaccttaagtcctacctgcttacagattgtacgggtgactttatcgttgtccccggtcaaaatcttcgttgtcacaccatgggcttttaaagccttgatcgcatccgcagtagactctttcggcggatcaagaaatgcaagatatcccataagcaccatatcgcactcatccgttacaccgaatgcacctgccggagacggattgcttttctgtgcgattgccagcacacgaaatcctttctcattgagatcatctactgttgcaaggatacggctttttaattcctttgtcattggccgcacttttccgtcacactccgcaaaagagcagatagaaagcatctcttctaccgcaccctttgtcaccatctgcgtctttccatcccgattctgtacaactgtcgtcagtctgcggcgagcgaaatcaaagggaatctcatccacttttacatagtgctcggacagatcaacaagctgtggatcatccgcttcttcctcttctgttttctggatgatcgccacatccatcagattcttatatcctgtctggaagtaactgttcagatacgcatgcctgagcacacgaagatcatcctccccatttacatttaaatgatactcgagaacaactttatcctgtgtcagtgttcctgttttgtctgtacatagaatgtcgatcgcaccaaaattttgaatagaattcagatttttgacgatcgtctgcttcttgctcatggacacagcacctttcgcaagacaagtcgttacgatcatcggcagcatttccggcgtcagtccaactgcaatggaaattccaaataaaaaggcagagagccagtcgccttttgtaataccatttgccacaaataccagcggaaccataaccagcataaaccggatcagcacccacgataccgcgttgactcctttgctgaagcttgtttccactgcttcatgcgccacttctgaggccatggaaccaaacagtgtatgatccccgactgtaacaacgactgctgacgcacttccggaaaggacattgctgcccataaacgcaatattagtgtaatccgtaattgcatccctggtctcattgaccatcggtatcttttcaatgggctcgctctctcctgtcaggcttgcctggctgacaaataaatcctttgcatccagaatccgcacatctgcaggcagcatgtcccctgcagacaggtgaacaatatcccccactaccacctcatccagcggaatttctgccatttcctgacctttgcgggttacagtacaagtcgttgtgatcattgcaagcagtttttcagccgcattgccacttctgctttcctgtacaaaacgaagcgttccggataaaaataccatcgtcaaaataatgacgaccgtcagacagtcaaaatcctttgacacacagccaaacagagagaaatgtggaaaaatcatatccgtaaaggatgaaaccagcgccagacaaaacaaaatcgcagtgaacgggttgataaatgcaccagccagtctctgcggcagagttttctttttttcacgagtcactttattggaaccatattctgaacggttttcctctacttttcccggttccagtccacagagtgttgtgttcagatatcctaacgtttcctgtgtaggatgtgttgccgcaaactgaatgcggcgattctgctcatctcgaatggcagctttctgtgctgtctgacgaacttctatacgatttattttcttattcatcggtctatacctccttctttttgaggcaagatccttatatttcagggagaaaaacagattctgccctctctctttctataaacatctgcctgtaaatctgcgtactaccgtcagaatccatttttctcacctccatccattcatgtaatatatcgataagaacccgcaaatacgggtttaattaaagtataaaaaaatcgcatagaaaatcacatagtcaaaaccttgcgattttcttgcgatttagcaagaattgttactgttacagcctgtcactgaatttgtatccgattccccatatcgttactatatactccggagcatccggattgggttcgatctttttacggatcttacgaataaaagccataatattgctgtcatccatcaaatattctccatcccacacagcctgatagatctgttcctttgtaaagacttccccacgattgcgcgcaagaaacaaaaggatatcaaattccttcggcgtgagagaaatctctgttccgttttgctccaccttgcgagatttcggataaatttccagcgtaccgcagcggatgaccgaatgatcccacacagataattcatccgtatctgattccaatataagagaactgcattctttattcagcaaatcttcgattccgtttttcaattcaccgggtggcagatgctccataagccacagagcaatggaggaatccagattcacataaccaatattttttttcatattccggctcctcctttctcagatcagatcctgattctttttgatatagaatgcttttgccagtgtgaccaacagaagatacgcaatcacatctatgaccaaaaacagaaaatagacaggaggcatcgcagtcattccaagcatcttccctaccggagtaaccggcagcagtgtaaataatacaatccccagaatcgtaactcccgtgaccatacgccccggtctgctttgtatcagcggaagctgttttgtacgcagaagctgcagaatcaatacctgtgtccacatggattctaaaaaccaccctgtctgaaacatggaaataaacaagctctgcttctccgccgaaagacttccaaaagagccgccgcacactcccggacaaagaacaaaatacaaaaacacaaaggtcagcagatcaaacagcgaactgaccggtccaaaaaaggtcatgaattttcccagtgtcctgccagaccactccaacggttttgtcaacagatctgcatctacatgatcccacggtaaaatcagacaaaggatatcatacagcaggttcagaagcagcagctgtatggaagtcatcggaaaaaacggcagtaacacgctggctgcaacaatcgcacaaatattgccaaaattagaagatgccgtaatcttaatgtatttgagcatattggcaaatgcttctcttccctctaaaacaccttcttccagcacattcagatcctttttcatcaggatgacattcgcactctcccgcaccgcttctgttgcattttcaacggaaatccccacatctgcccggataacagccggcagatcattcagaccgtctcccagaaatccaactgtatgcccgtttgtctgcagcgtttccaccagcatggctttctgttttggcgagagttctgcaaaaatatttgttttctcaaccgctatgggcaattcattttcagaaagagcatccagctgtgctcctgtcagacaactctctgttggaattccgatacgcctgcaaatggatcgtgccacttgtttttgatctcctgtcagcacctttacattcacatgaagactgtgaagcttctgaattgcacttgcggcactcttctttggcgcatcaaaaaatgccagataccccaacagaataaagtcatgctcttcctcgggaacaagggctgctctgctcattgttttataggcaactgcaattaccttcatcccgtcttccagcatttcatcaaccacagcgtgaacattttgcaggatatccgcacctgccgctgttttctctccacggtattctatcatgctgcactgctctgcaacttcctcaatacttcccttgatgatccagatattttcttctcccgtattcaataatacactggaaaaacgtcggttatagtcgaaaggaagttcatctgtcttttgatatttttctgtcagctgcctgtagtaatctgcttttccctgcattttctccgccttgcagatcgcctcgtccagatgatttcccactccggtagaataatgacttgccagatatgcataatccagcaccttctgactctcattcccgagaatatccatgtaatactccagcaggactgtatcctgggtcaatgttcctgttttatccacacacaggacatccatgcttccaaaactctgcatcgcattgatattttttacgattgtctgtttctttcccatcgaatgactgccttttgccagacaggcgttgaccaccatcggaagcagctccggtgtgattccgactgcaacagaaagtgcaaataaaaacgcttctaaccagtctcccttcgtcagtccgcttgcaagaaacacaaccgggactaaaactgtcataaatcggatcaacacccatgcgatcgaattggcaccacggtcaaatccctgcttgcgtgcctccacagacggagtcagaccaccgtaaactgtctcctgaccaactgtcaggacaatcccagttcccgttcctcctgcaactgtcgtgcctccgaacagtatattgctgtaatctgtcagtttctgcggttctttgggcaaagcctccggaaatttttcgagtatggcactttcaccggtgatcactgattgcgaaacaaacaaatccgtcgcgcctgttaaccgcaaatctgccggaaccctgtcgcctgcctctaagcggatctgatcgccaactaccaattcagaagaagataactccacccattgtccatctctcagtacctgaaccgttgtatgcaccaactgaaacagttcatctgcaactcgtttagaatgcagctcctgagtcagccggacaattccactgagaatcagcatggaaaaaatgatcaggaccgctgtcagattcttctgataatcactggacaaaaatacatctgttaccaaagagattaaaccaaggaaaaacaggatcgtagaaaatggattcacaaaagctcttcgaatacaataaaacatcgtatccttattctttgcagacggcgcattatttccatatttctgtcgccggatgattgcctcctcctgcgtaatcccctctgcattgatctgaagcttctgcatcatctgatcaggtgcgacacacgcatattcttttaatcgttcgtgaaccgcttctttctgattcatgaaatttgtacctcctcaaaatttactctctcgaacaggaaatgaaagaggtgcaggcgcaaccaaaaggtcatgcccacaccttaatttgtaaatgatcggcaaatgcgatttctatttgtagttgacaatctgtccgaaatcagctttaagagaagctccacctacgagtcctccatcaatatccggctgtgcaaataattcaggagctgttgcagcgtttacagatccgccgtactgaatgcgaattgcttctgctgtagcttcatcataaacttcagcgatgcactcacggattcctttgcaaacttcctgagcctgctctgttgtagctgtttttcctgttccgattgcccagattggctcataagcgatcactgcagtttttgcctgatcagctgttacattctggaatccaacttttacctgctggcgaatgaaatccattgttacgccctgttctctctgctccagagtctctccacagcacatgatcggtgtaataccgtgctcaaatgctttcaggacttttttgttgacatcttcgtttgtctcaccgaagtaatctcttctctcagaatgtccaagtacaacgtattttactcctgcatctacgagcatagccggagagatctctcctgtgtaagctccgctctcttcgaagtacatgttttctgctccaacctggatgtttgttccttttacggcttctacaaccggtacgatatcgatagccggtacacagaatacaacatctacttcttcatttgctaccagtggttttaactcttctactaatgcaactgcttcgcttggagttttgttcattttccagtttcctgcgataattttctttcttgacatactcttcactctttcctgtactgttatgtacactgtttattccaaactgcgcctgcggcttgttttcactaagctttgcttgttttcgctaagcttcctttacgggatgttctccttactaggctcgaaaatacctcgccaagtgcggagaactaagtaaacgctaagctttttacttatcgttagctgctgctactcccgggagttcttttccttcaaggaattccagagatgctccaccacctgtagagatgtgtgtcatcttgtctccgtatcctaactggtttacagctgctgcggaatctccaccaccgatgattgtcacagcatctgtctcagaaagtgcttttgcaactgtttctgttccgtttgcaaagtttggcatttcgaaacatcccattggtccgttccatacaactgtttttgcagattttactgcttcagcatataattttgctgtctcaggtccgatatccagtcccatccatccttccgggatttcattctgaggaacaaccttgatgtttgcatcattagagaattcatctgctgcaactgcatctacaggaaggagtaattttacacctttttcttttgctttttcaatcatatccagtgcgtactgtaagtaatcttcttccagaagagattttccgacatttccgccctgagcttttgtaaatgtgaagcacattccaccaccgatgatcagtgtatctactttttcaagcaggttgttgattacagaaatcttgctggaaactttagatcctccaagaattgcaacgaacggtctctctggattttctactgcatttccaagaaaatcgatttctttctgcattaagtatccaacaactgctgtatctatgaactgtgtcacaccaacatttgaacagtgtgctctatgagctgttccaaatgcatcatttacaaatacatcacataaagaagccagttctttggagaatgcttctccattctttgtctcttctgctctgtaacgtgtgttttcaagaagtacgatatctccatcgttcattgcttccactgcagcttttgcattttctccaacaacttcagcgtctgctgcaaattttacttcctgtccaagaagttctgacaatcttactgctaccggtgccagagataattccggttttggttctcccttcggctttccaagatgtgagcaaagaatcacttttcctccgtccgcaactaattttttaattgttggaagtgcagccaccaggcggttttcgtctgtgatctttccatcgatcaacggcacgttgaagtcgcatcttacaagcactctttttccttttacattgatatcatctactgattttttgttaagcattttgattgcctccctgtgtttattttctgtcagacaaaaaggtccggtccaaataagaccggaccctttgtgagcctatttttcaaaaatataatctaactgattaaatttttctatatttcgacttacagtaatgttccgaagtgtttgattgttcttaccatctggcttgtgtaagaattttcgttgtcataccaagaaacaacctgtacttctgttgttccattgtctaatggaagagccattgtctgtgtagcatcgaataaagatccaaatctcattcctacgatatcgctggatacgatctcatctgtgttgtatccgaaagattcgttagatgctgctttcatagcttcgttgatctgatcaactgttacgtttccttcaactactgctgtaaggattgttgtagatcctgttggtgttggaacacgctgagcagatccgatgagttttccgttcagttctgggataaccagaccgattgcttttgctgcacctgtgctgtttggaacgatgttgcaagctgctgcacgagatcttcttaagtcaccttttctctgtggtccgtcaagtgtcatctgatctcctgtgtaagcgtggattgtgcacatgataccagatttaactgctgcaaggtcgttcagagcttttgccattggagccaagcagtttgttgtacaagaagctgcagaaatgatgtgatcatcttttgtcagctgctcgtggtttacattgtatacgattgttggaagatcgtttcctgctggagcagagataactactttcttagcacctgcatcgatgtgtgcctgagcttttgctttagatgtgtagaatcctgtacactccagaactacgtctacgccgatttctccccatggaagttctttagcgtcagcttttgcatagattttgatttcttttccgtctactgtgatagaatcttcaccagcttctactttgtcagccagttcatattttccctgtgtagaatcatattttaacaggtgtgctaacatttttggagatgttaagtcgttgattgcaactacttcatatccttctgctccgaacatctgtctgaatgcgagacgtccaatacgcccaaatccattaatcgctacttttactgccatgattaattcctcctaaagtttaaaaaaattgttgctgctttgcagctgtttattgtaaatctccaaccaagtaattactttgttaaagattcatcaactacggttattgtactaaaatgaaaacaaaaattcaaccctaaaatatatttttatagaagttgtttaaaaataggttttctgtcctgaaattctgtataatatttaaagccgcacgccttcaaaacgtctgctgctttctgaaaatcataagccacatgctcgggcttatgcgcatcagatcctactgtgatgatttccccgcccagttctttataccggcagagaatttccggatgggggtggcagaatgcaaggccgtatttccatccggccgtattcagctcgattcctttccccattgcgatcacttttttcaggatttcatcaatctcctgtgcatattttttgtaagaatactgcctggcctgacactttccataacgtaccacataatccagatggcccagcacatcaaaactgctgactgcatccagattttccagggtagccagaaaagtctctttgtaaacttcttcatcagaccgtccctcaaaaatctctccgtaatagggatccatcccatgcaccacatgaactgaaccgatcacaaaatcaaacggatactgattcgtcagttcttcataaaatcccgcaagatgaggctgcagccccagctcaatccctctccggatctggatttcccccccatatgcctgtttccactctgccagcttcagaaaatactcatccagatccaccagaaatgcctctacaccggtatcttcatgaaacggataatctttgtcaatatgatcggtaatacaaatggactgcaatccttttttgagcgcactctcgatcatatcccagatatctgcatcactgtccgtggaaaatcttgtatgcatatgagaatcacttgttatcattgaatcgttcctccgccgagcacatactctccatcataaaatacaacagcctgtccgggagtgaccgctctttgtggttcatcaaaggtacacagtacttcatcctctcccgtcttctctattgtacaccaggcgcctttgtggttatagcgtattttggtaaatacatgtaaaggctcggttaaatcttccactgccataaaattcagatttctggctcgaagctgtgtagtcatggattcttcttttgtcccgatcacaacttcattggtttccggacggatctccaaaacaaatgcgggatatccaagtgccagacccagaccttttctctgccctaccgtataatgggtaatccctttatgccgtccaagcaccgtaccgtctgtgagcacgaaatttccttccggaactttcacccctgcctcttcttcaatataagcggcatagtcgccatccggcacaaagcagatatcctggctgtccggtttgttggcaatcctgagattgatcttttctgcaatggcacgtacctcgtcttttgtgtatttccccaccggcatcaaagtccttttcagctgttcctgtgtcagattatacaatgcataagtctgatcttttgcaagcgtagcagaacgccgaagagtatatcttccgttttccagctgtaccactcttgcataatgtcccgttgcaatatactctgcaccgatcgagagacttctctgtaaaagagattcccactttacataccggttacaggcaatacagggattgggcgttcttccattctgatattcttccacaaaatagtcgatcacattttccttgaactcttttttaaaattcatcacatagtatgggatttccagtgcagctgccactcttcttgcatcatctaccgcactgagtccgcagcagcctccgttttcctcctgagcggcctgttcttcgtcctgccagatctgcatggtcactccgatcacgtcatacccctgctcttttaaaaggtatgccgctacggaagaatccacccctccggacattccaacaacaactttactcattttagtattcctcttcttcctcttcctcgccttcgtggatatcagatttcggcttttccagcccctcgatcttaatatgatgcttctctgcgtaatcccagagcgccgcatgaattgcctcttctgcaagaagagaacagtgtacctttaccggcggaagtccgtccagagcctccataaccgccttgttcgtcacctgcagcgcctcataaatactttttcctttgaccagttctgttgccatactgcttgtagcaaccgcagctccacatccaaatgttttaaattttacatcccgaatgatctgattctcatcgatatccagataaattctcataatatccccacatttggcatttccaacggttcccacaccgcttgcattctcaatttctcctacgtttcttggattttggaagtgatccattactttttctgtatacatatcaatactcctttttattatgcattctgttttttgataaagtcttcatataatggtgacatacctcttaagtttgccacgatctctttgagtgtatctacggtataatccagatcttctctggtcgtctcttctcccagtgtcatgcgcagagaaccatgtgcgatttcgtgcggcagtccgatcgccagcaatacatgcgacggatccagagaccctgatgtgcaggcagaaccactggatgcacagattcccttcatatccagcatgatcaaaagagattctccctcgataaaccggaaactgaagtttacattattcggaagccggttcgtgcggtctccgtttaagcggcagtatggaatttctgcctcaatccgctcgatcaggtaatctctgagttttcgctcttttgcggttcttgtttccattgtccgcatcgcacgctccacagctgcccccattccaacaataccaggcacgttttctgttccggcacggcgctttctctcctgtgcacctccgtgtacaaaggatcggatcttgactcctttgcggatatataaaaatccgattcctttcggtccgttgagcttatgtccgcttgcgctgagcatatcaatatgacaggcatccacatcaatcggtatctggccaaatgcctgtactgcatctgtatggaacaaaatcttgtgttcctgtgcaatctctccaatttcccggatcggctggatcgttccgatctcattatttgcaaacatcacagaaataaggatcgtatccggacgaatcgcttttttcagttcatcaagctttacgacaccgttctcgtccacatccagatatgtgatctcaaatccacgctgtttttccagatactcacatgtatgcaggattgcatggtgctcgatctttgtcgtgatgatatgttttcctttcttctcatacgcttcggcagtcgctttcagtgcccagttgtcagactcggaaccccctgccgtaaaatagatttcgttagcctgtgcgccaagtgcctgcgcaataatctctctttgtctgctcaccacttccttatttccggaagcaaaactatacacactggatggattgccatagtgctctgtaaagtacggaatcattgcatctactacttccggtgcagttttcgttgttgccgcattgtctaaataaatcagtctgctcatgttctttctccttttgtttattttctgcagtctctattggaaacacacgtctggtcggccttgctctccctgagattctcgcccacttctacgagtgcttttaaattcatctcatctacggtctgattgatactgtcattgatccgctgccacacatactttgtcacacagttatctgctgcctggcagccgccctctaagagaaacccggaacattctaccggattgagatctccttccagcgcacggagtacctcccccaccgaaacttcttccagttcctttgcaaggacatatcccccctgtgctccgcggatgctctggatgatacctgccttttttaattttgacatcagctgctccagataccgctccgaaatttcctgtctttccgcaatacttgtgatcgatacaggaccttccccgccgtgctgcgcaagatcaatcagtgcgcgcagtccgtatcttccttttgtagataatttcacgctctcaccttcttgctgattcgcttattttctaatccctattattttactaggatttcctcttgtagaataccattgccgttttgttctgtcaaggcaaaataccgaatatgttattaaaaacacttctttccaggtgaatttatgtctgccagaaaaacaattttacagggaaccctgatcctgactgccgtgggatttctgtgtcggttcatgggatttttttaccgtatctttttaagccacacattcggagaagaaaatgtcggcctataccagcttacttttccggtatttgctctctgcatctcatttacatccgcaggattagagaccgccatttccagaaccgtagccagaaaacaatccctccatcaacccagggaagcctctgagacactttgtctcggactttttatttcatgcctgctctctgtgatcacgatgatcatcctgcaaaaaaacgcagccgatctctcgactgcgctgctcggcgatccacgttgtgaagagatcctgattctcttatcttacgctttgccgctttcttctattcatggttgtatcatggggtactgctatggtttaaaacagacacagatacctgccgtttcacagttgatcgagcagactgccaggatcttatctgttttctgcctgtaccgcttcgcgatacgaaacggacttcatgcggacatttccatcgcagctgcgggaattgcattcggagaactgttttctaccttttattctgtcagaagacttcaaaagagccgatctgatattttccgtccgggattttctttctcttctataagactccgcttccgggaacttgtccccttgtctctgccgcttactgccaaccgggtactgcttggcctgctccagggaattgaagctgtttcgatccccggctgtctgaaactttataatcacagcacttccgaagcattgagtacctatggcgttctgactggaatggcacttccctgtattctattcccgtccgccatcaccaattctgtttctatcatgctgatgccgacagttgccgaacttcaggtcaaagaccaggcatccggcatcagaaaactgctgcaaaaagtacttggctcctgttttctcatgggattgttctgctgtctgtttttcctgttcttcggacagttgatcggtcaatttttgtttgccagtgatctggccggcaattttatcatcacactggcgtggatctgtccttttctgtatgtaaacggttctctgctgagtgtcctgaacggatttggcaaaacaacaacctcttttacgatcaacacagtcgggcttgccatccgcatcggaagtgtgtttttcgcaattcccgttttcggtatccagggatatttatggggcttattgatcagccagcttgcagtcagcatctgctgcagtgttgtcttaaaacatctcatctctgcttaaagggttttcaaaaatgctccgaccaaaaccggatttacatacagttctaacacgataccaactaaaagcagacctccggaaaccagacttttctgtatattccactgcatacgcgggtagcagtacgcataccacaccacgatcagatacgctggaatataacataaaaactgggggagcattcctgcaatgcacaggatgctcccttttactcccatcccgagaactgccatagaaaacagaagtccggcagaaaagcccgtccaaatcaagaacagaataactgccgcttttctgaattttgtaaaagcagatcccagcagcactaaaaacggcaaaagacggacctgcagcaaataccagatatactctcccgtcagaatatctgccgcccggtattgtttcaaaaaatattcgctgaaaatccctgcccccgctgcaaactgctccgcttccagattgacatataaaattcccaataaaaatcccggcataaaaagagccagtagctgcctctttacatgaaacatcttcaatggtttttctccttttcctttcgatatttcattatatgccgggactttttatttattcagtttttcgatacttcgtctcatatgccagaagagcggcaatggtcttggaatcttctatctcaccggaaaaaatcttttcttttaactcctccagtgtgtatgcctttaaatctataaactcatcttcatccagatgctgtctggagggaatcagatctcttgctacaaaaacctcaattcgttcattgcaaaaagccactgttgtccgcaatgtgatcagccattccagattctcactgcgaaatccagtctcttcctccaactctctgcctgcacatacaattcccggctcatctgccgcatccagcgcgcctgccggaacctccagtgtataacgctccagtgcatttcgatattggcgcaccatcagaatttttccatcttctgttacaggaacaaccgctgcagcccctttatgactgataaaatcccatgcggccgtatgagtaccgtctatctccatcgtatcctgataaaaatctacgatcgctcccttatactttaattctctcttcagacgtttgatcttttcgctcattacacaactcttcctttcatccacgaaaaagcggaacttcttttcccatcttgcgatgtttcagaaattccgcttttcatttcatattcagttttctattttgcgtaatccgtgacgcgtgattcgcggatcacatttaccttgatctgaccaggatactctaattcaaattcaatctgattagcaatctctctggccataagtaccatatcatcatcagttacctgatctggaactaccattactcgaatctctctacctgcctgaatagcaaaagatttgtcaacacctttgaactggtttgcaatctcttctaattgtttcaatctgtttgtatatgtctctaatgtctctcttcttgcacctggtcttgctgctgagatcgtatctgcagcctgtacaacacaggcgatcaacgtctgaggctctacatcgccatgatgtgcttcgactgcattgatcacagtcgctgattctttgtactttctgcaaagatccacaccaatctgaatgtgagatccttccacatcgtgatcgatcgatttaccgatgtcgtgcagaagtccagctcttttcgccatacgcacatccagcccgatctcgcctgccagaagtcctgacaactgagcaacctcgatggaatgcttcagcgcattctgtccgtagcttgttctgaatttcatacgtccaagcagacgcagcaattccggatggatacccggtacaccaacctcgatggctgctgcctctccttcttcgcgaatcatagaatctacttctttctgtgctttttccaccatctcttcaattcttgcaggatggatacgtccatccacgatcaagcgttcaagagcaatacgggcaacttctcttcggatcggatcaaatccggataacacaactgcctccggtgtatcatcaatgataagctctacacctgtcagagtctcaagagttctgatgtttcgtccctctcgtccgatgatccttcctttcatctcatcacttggaagctgcacgactgaaatcgtagtctccgctacatggtcagctgcacatctctgaatcgcattgacaacatactcttttgctttcttgtctgcgttctcttttgcctgagactccagctctctgaccatctttgctgtttcatgtttcacatcttcttcaacagttttcaacagatattcttttgcctgctcggaggtaagacctgagattctttccagttcctgcactcgtttctgactgagttcttccactttggcttcacgctgtcttaaatgttcctcttttgctgtaaattttgcttcacgctgctcaatagcttcggaacgtttgtctactgcttcttcttttgccagcacacgcttttcatagcgctgcagttccgaccttctttctttcgtctctttttcaagatcatttttcgtccggatggactcttccttcacttccaaaagagcttccttttttgtcgtttcagcagttttcacggcatcgtcaatgatttctcttgctttcgcttccgcatttccaatcttggattccgcattgttcttcagattggtaatggtcagatagcgagttacgacaccgactatcaacgcgagggccgccgcaataattacacataaaattaccggcacaggagcacctccttatttaattttcattgtacatgtttatgtatctgcatacataaatacaacacttaaattttatactgttttaccaaccctgtcaagcattctcatcataattttgtatcacttgacggatgtcttcatatcggaatccttttcgtgccagatgaccgtataatttttgcatttgctccggtgtagccgtccttagatccacacgctttttctcgataatcttaaggattgcctcagtctcaccctgtccgtcaaagcacccttctacgacctgctgcgcaatttcccttgatacgcctttctggcagagctgatataaaatctctcgtctgctcttggatgcctttctactctgtacaaaattttccgcataccgcgcgtcatccagatatccgaaagacttcacgtaagaaatcgctgcctccactgcttccggcgggtacaatccctgacgcagtttctcccgcagtgccgattcgctgcggtccatatcctccagaagatgcatggcacgaagctttgctcttttacagatcaccttctgcagaatctcctgtacagtatcctcctccaaaagattcccttcaacaatccggtaatgcgacagttcgcccttgtataacacaaaggcgaactcctcatctaaatacactttatacttgatcttggtcagcatctctactttcgtgacgaccattttttattcttctccctcgatcgacagttccatctgttcttcttttggagtcagcttcagatcactctcttttacctcttcctctccttcaatcagatgatagtgctggcgtacttttctgtccagctcctccatcacctccggatgactggtcagatatgcttttgcattctcacgtccctgtccgatcttctctccttcatatgcataccacgcaccactcttcttgacaagatcaataccaactgccagatccagaacatctccttctttggagattccttttccaaacatgatatcaaactctgcctctttaaacggaggcgcaatcttattcttcacgatcttgatgcgggttctgttgccgaccatctctccgctctgcttcagcgtctcgatcctgcggacatccatacgaacagaagcgtagaacttcaatgcgcgtccacctgtcgttgtctctggatttccaaacattacgcctaccttttcacggagctggttgataaagataaccacacagttggatttgctgatgactggtgtcagcttacgcagtgcctgcgacatcagtctcgcctgcaggccgacatgactgtctcccatatctccttcgatctcctgctttggcacgagggccgcaacagagtcaatcacaataatatccactgctccggagcgcaccatcgtctcagcaatctccagagcctgatctccgctgtcaggctgtgaaatatataattcatcaatatctactccgatcttcttcgcataaacaggatccagagcatgctctgcatcaataaatcctgcaatcccgcctctcttttgtacttctgcgatcatgtggagtgtcactgtcgtcttaccactggactccggaccgtaaacctcaatcacacgtccctttggaacaccgccaagtcccagtgccagatctagactcagacaccctgtaggaaccgtctctacagcaacatgactgccctctcccagcttcatcacagtaccttttccaaaatccttctctaactttgcaatcgccgcatccagcgcttttttcttttcatcacttgccataccgaatcttctcctttttcactcgaacagttgttcgcttctgtttattatactattatatgctccttgaattgtcaagtaattttttccatcctactccgtccccctcctttcgttactgtttttctacagaaaacagagatgataaaaccatagaatatcctctttttatccatcacaggggaaactctcttgaacagacctggaagaactccttgaacgtctgggttataaccgagtatgatacagcacaggcggctgcatgataaagttctgttttctataacttacagaactatcttatcatgcggccgcccgggatgcaatctatttattttaattcctgatgaagaatttctccattgctctcaatcactttctggtaccagtaaaacgattttttcttataccggttcaaagttcctgttccatcatcattgcggtcaacataaatatatccgtaccgctttctcaactctgctgtagaagcacttaccagatcaatacatccccatgatgtatatcccatgatttcaactccgtcttctattgcttcttcaacctgtaacaaatgttctttcaaataggcaatccggtaatcatcctccactgtcagttttccatcttttccttctaccagttcatcaaccgcaccaagaccgttttccacgataaaaagaggcttctgataacggtcatacatctcattgagtgcatatcgaagaccttttggatcgatctgccatccccattctgaagcttccagatatggattcataacaccacccatcagatttccccgtcctgcttctccctgatttggatctgcagaagcacagatactcatatagtaactgaatgaaataaaatctacggtatgtttcaaaatttcctcatcttccggggcaaactgcacctgaatcttatgttctttaaaatagcgcttcatatagcccggatacctgcctcttacatgtacatccaggaaaaaatcattcatatgccgtctttccatcacttctatcatgtcatccggatgcggtgtcaaaggataaatcggaatattaagtaccatacatccaatctttgcctccggcatcatctcatgagcaattttagtcgccagtgcacttgccaccagttcatgatgaactgcctgatacagatcctggcgcgataacttttctttttccgtataaatcccgccgctcaaaaacggttcatgcaaaaccgaattaatctcattaaatgtcagccagtatttcactttctctttatatctgccaaaaatcgttctgacatatttttcatagaaaccgatcattttccggtttacccatccatcatattctttcgataaatgcaatggtgtctcatagtgagaaatcgtaaccaacggctctattccatatttgtggcattcgtcaaataccgcatcataaaacgcaagccctttttcatttggctgctcttcatctcccattggaaaaatgcggctccaggcaattgacagccgaaaaaccttaaaccccatctctgcaaacaatttaatgtcttctttatatcggtggtaaaaatctattgccaccagcttcatgttatcttctgtcggaacctctgttcttggtcccacaattccttttggtgtcacatcctggatatccagcccttttccatcttccagatatgcaccctcacattgattggccgctgttgcgcctccccacaaaaaatttttcggaaacattattcttccactctcccttcttttaatacaccataatgatacaaggctccaatcaaatttgcatcattgtaaaacttacagtttgttatctcaggtttcggaacatacggtgtaattttacgaatcggatgatgttccattaattcattcatgcttctgttcaaatattccagcagcaacggctgtttactgattcctccgccaattgccaccacatccaaatccagtatcacatttaaattataaatttgaactgccagcgtatccgtaaattctttcagtgctttcaataccgcttcttcccccttgtttgcacgatcaaagatctgaatcccatccaatttttccggatcttctcctgtataaaaagctgctttttgggcaagggtctccgcgccgtttgccatgccccagtatcctttcgcttcctctgattgtttctgatctgtcaatatataactgtattcaccggctgtaaaatgccctcccctgtacaatttgtggtctatgattatcccaccgcccacaccagtacccagcactacaaccgctccgtttctgcagtccttcagactacctttccatttttctgcaagtgccgcacactttccgtcattttcaatcgtcaccggaagtttatatctttgttccagtaattgcacgaccggaacttcattaaaatatgccaacattcctccggtcacacagtaacctttccggctgtccaacattcccggcatactgacagcaattccttctatttgtttctgatacttttctacaacaatatccagtctctgcaaaaagtcttccagcgtatgatccacatatcccggcgtcggaaatttgcctctttccaatatcctggcactttcattcataagcgcatattttacagctgtaccgcctgcatcaatcaccagatattttttcatcttgtcctcacccttactatccaaaattgatcgccagttttgcaaaaaagtcttctaacgtcaatctgacttccgctgttttataaaccctgatctttcgataatcctgcccgtgaatataggtcatgtcatcagccactctcggtgccggtatcatctcatagcttactttttccagttcctccataagaactgctacagtcgcctgatctcccagcccccatacttctccatgaggccatgccatattgtaaactgccgccttatgattaaattcttctaactgctcaaacaaatatttgcctacttttccacatggacgcactttcagctgcaattctgccagtgaaacaccaaactgtttatatacatccattggaatctgccatacttccgcttttgaagcaaaaattacatttgctgcatgaatatccatcatcagattaaattcaaatcctccattcggataggcggctcctccgatccagataatcgtaatcctttctgcaatttccggacagatcagcaaagcagatgccacatccgtaacagctccctgacaagcaatatacaatggtctttcatccactttcaaagcttcttcgataataaatctggcgccctctgattctaccggagtctgctcgtcttccattccctttgaagcgcccagagctaccggatattctccttctatccccatcagctccatcatcctgatcacttcatcatagcttgcttttgcagtattctcctctccgtattcctggggatttttacaaaaatgtcccgctacgattccccgcacatcaaacttgggagtcatcagatggtgtgcaagcgcaaactgatcatccgcctcatttttacaatccgtatgaacaatcactcttatttttttattttccggtacttgatatgcatacttccacatactcttctcctccttatcttttccgctttcaaaacagattttctatcctttattctgcagtttgttctgccagtttttttctccgctctttcaattcacgttccatttgatcgtactgtttatccagatcatagaaatacatcacaacaatacttgcgatatttgcaataatcggaagaataataaatgcaaatagaattgccatattcgcttttgatgactgcactgccgccgttccgtcataagctccccatgcaagcaaacctgctacaatcgcactcgcacatgcactggaaactttattggaaaatccattgactgccatctgtgttcctgcaagattccttccgctctgccattctccataatctgccacatctgccaacatagaaaaatacatgttggaacgaaatcccattccgaatcccatcattcccactcccaggaatacaatcgctacattgctgccgcctatccagatgatcaaagaccccaaaatctgaatcaaagttcccacaatcgagatatttcttttactgtattttgcattgagacgtgctgcaatcaacattgaaaaaatcggaacaatcgttgtgatcgtcactgccacagaagtcatcatctcatttcccacaatatacttgaagtaatatgcaatcgctgcaaacatgccgagatatcccaaaaataaaaagaatgtataggtaatcattaacatatatggtttgttttttaccaggtatccaatatctttgataatacttgttttttgatttgttctcggcggcaaattgatttcacgaatacttgccacacagatcagcatgatcaaaaacaccatgattccaaatacaatatttgtatttctatatcccagcgcctgatttccatgtcccagtttttcaatcagccacaatgccatagatgcagatgtcaaagatccaagattcgagaaaattgttcttgtagtggcaattttagtacgttccgtggcatctgcactcaaagtcggcaaaatggaccccatcggaatatttaccagcgtatatccaaaagaaaaaataatatatgtaatatacgcccatgccagttttccacctgttgaaaaatcaggtgtcgtaaataccagtaccattccaaccgcaagtaccggagcgcctgccagcatccaaggtctgtttcgtcccattttagtattggtccgatcaaccagcgccccaaccatataatctgtaaatgcatcaataaactttgtgatcaaaaacataaacgcagcacttgccgccggtattcccgccacatcggtataaaaaataagcagatatgtgtttaccattaaatacgccagattacaggcatagtctgaaataccaaacccaatcctctgacgccagataaattttttactgtttgttcctgtttctttcatcatcactacatttcagtcctttccactgttctttcctgtatgaccggccggttcatttgatgatgctatcatatctgctttcgtcttttttctatatcatatttctgctttatttattatatttccatcatttttattaaatttcttctcttgaaacaaattccggacttttataatagtccctgtactgcttcggcgtcatatttttatacaccttaaatacctttccaaaatggctctgagaggaaaaacacagatactcactgatctctgttagagatgcttcggaatatttgagcaagttttctgctctttcaatccgcatgtgcatactatatttctgaatactctctcccgtttcttttttaaatatcctggataaatggctttcactgactcccagcgcctccgcaatatccggtatacaaattttctgatgataatattttcgtatatattccttacactgctccgtataccttgagtttgctcttttttctctttcttctacgaccagttttgcaaaatcatacaaactccttttcctatattcaaaaatttctgtcattcttttgcactggtctatcttattgatataaagatcactgagcttatacgctttggcaggagctgccccaccttcgattgctgctcttgttgccaacgtaatcgaacatatccccagatttctttcgtttcggatttcattttccgagagctttcccgcagtacttgccaataattctactgcccctactacctcctccagatttccctcacgaatataatccatcgtttttacttcttcctgataagtatgatgatatatatcctctatatctattcttacatccgcttcaagtccaatctcctgtttctcgatcagaccattcgcatccaaaatttcttcatcttcgtatttctcctcaatttttatataagataaaagctccaataaagctaacagattctgcagttttagtttgggcggacactgttcattttctatctgataagctttacagtatcggtgtatctctacataagacatatcctcaatacagattggtcccagcagaagcatcttcgtcattttttctctcatcccacaaaaaatcactttattctcatcctgataaatcaccggtgttttctggttcatgatccgatttttcagaagttcgcgaagttcttctgataatatcagtggattgctttgctctgctaataccccataacaactgatttcatccgtttcacaatcccattcaaaaatttttatatttgtcataatactgatcttcgtatataaatactccattttcttatcctctcaataggagagaggaagaataaatttcctgcccctctcattgaaccgtacgtacgggtctcgtatacggctctacaacttatattcctactttaactatagcaatccaagcaattactgcacataattacacgaacgaaaccaccctaaacaatgatatcatatcacaatctgaagtttcggatgtcattctgactcagggctgatttcccgcattcccttttccagacggtaaacaatacttgtattgaccgaaaagcattctgcgatttcctttgcattgtatgtcttatcccggcttcgatgagtaatttacgtgctcgtataacataataatcaccttttaactttatcataaacccgttgtcaagtgtgtgcagtattattttggtttgctatagtttaccaggaccaaagagtactttggcaggcatataaaaattgaaattatacatgactgcttaaaatctgtatggtaaaatatgattataactataaatgagcaagttcgtgattttgcataaaagaaagacacctcgattccatgtgttgtataatgaaagtgcctaaacaaacatttgcaacatttacgaaagaaggtgtctctcgcaaatactatacatcattcctcattcatatacaaccagtttaaaaaattaaacttatgcaaattttattcgaaccgagtaataaaccatcttatgagtatcctaatcagtattttcatttcaggatatcatggaaaaaccacgaactttgctaaaaacagttcctgccacagaactacgattgcccatttcctcaattccggaaaatgggatgattccttactttcagatacgttaaaatgttctgtcattgagattatttattcggaagcagcacgcaccggaaagcctgttttctgtattgtggacgatacgatcgcttcaaagacaaagccttcgtcacaagctttacatccgattgaagatgcgtattttcaccaatcccatttaaagggaaaacaggattacgggcatcaggcagttgctgttatgctttcctgcaatggcattgttctgaactatgcttttgtaatgtacaataagtccatttccaagattgacattgtacaaagcattgcaaaggagctgcctgttccaccggtaatgtcctattttctttgtgactgctggtatgtttctgaaaagataatcaatacctttgcacagagagggttccataccatcggtgctttgaaaacaaaccgtttgctgtatccatcgggaatgaaaaagaaacttcgtgaactggccgccgaattgtctgttacacatcgtgaatttgaccttgtgacagtcaaaaaacgaaactattatgtgtaccggtacgagggaaacctcaacggcatagaaaatgcggtagttcttttgagttatccggaaaaagcatttggtaatcccaaagcattgcgtgctttcatcagtacaaacgcagccctatctacacaggagattctttcctggtatgcatgtcgatggcctattgaagtatttttccgccagtgtaaggagaaactggcactggacggctatcagatacgctctgcacagggaatcaaaaggtactggctgcttatgtcactggcacatttcatgtgtgcagtgggtactggtaggttctgctcgtttgaaactggatatcacgaaatctgtgataccattcagttggaaaagtatcgttatctttttcaatgcgcaaaggaaagtaatgattttgattcatttatgaaattcgcagtgtagttttgtgcaatttttcaaatttgctcatttatagattataaataaatcgagattttaccagaataaaagaaaggttagtgaaaacatatgaataaagaaatgaaagggaaaaggattattttgcgtgaacaaagagaagaagatgcgccattttttgcctattggttcaatcagccgcaagtcatgtttcaatgcggctttgagaagcctaccgatgaagaagaggtaaaaacttgtattaatgtggaccataagtcgaaaaactcggtttggttcacgattacagacctcgacggcaatataataggtgaaactggtctgctccggatgtttcctgcatggcaccagaccgatcttacgattatcattcccgacccaaagatgcagcataaaggatacgggacagaagcaattcgtatcatgcttgatatggccttcaataagtatgaaatgcatcgtgtctcaatcggagtcgtagaattgaacacagatgcactggaattctacaaaaaaatcggattcaagcaggaaggtattctggaagaggcatattactacaacaatgaatacagcgattttattatgatgcgaattctcagccacgaatggaaataatggacaaattctattttaaaggggctgtcgcactaagttcatgaacttagtgcgacagcccctttaagaatcttcacatttaaattctcagaaatttattttgactctttcatagatttcacgcgatcctggatcgtcttattgaaattctcaatcttacgctcataagacgtattcatatattttgactgcagcataaaatctgctgtagaaaggttgttcgcgatcggaatatcataaacaaccgcgattcgaagcagtgcttttacatctggatcgtgaggctgtgcttccagaggatcccataaaaaaatcataaaatcgatctgtccttccacgatctttgctccgatctgctggtctcctccgagaggaccgctgcagtatcctttcacaggaagtcccgtacgctctgagatcagttttgccgttgttcctgttccgcacaggaaatgtcctttcaaaatctctttatttctgtcacaccagtctacaagttctttcttttttccatcatgagcaaccagcgcaatgtgctttgccttgccgatttccatggtcacaaaattatcattcagcatcttttttcctcctgtcttttaccttcactgtacagcttcatccgtctacgccatctgttccatggaatcaaaacggatggctgcgatcagaccgattatcacagttactatcatactataaatcagagcgattggaaagactaaatccatacttataaagattcctgccagcgctgcggccgtcaccccgatccccagcacgaacatctggaaaaaagctctcaccacatcctgtccggtacgtccaagcacatctcccaccacgcactgtgccagcaccttactgtacatccggttcgcctgaagtatcgtgtagatcaggatccccaggattacttccagcacatttaccttccacaagattccgatgggcacacagagtaaaactccatccacaaatgctttcacatgttccatcagtgtcgagtaccacagctttttcaccggactgtccggaatcagataaagatagggtgttttaatctcagtctcccactttccaagatatccgctgaagatcagagtcatatacgtcagaattccaagcagaaaaatctgaggaatcccgctttcctgtgctgtctctcgcatcgcaaatgccataacgatgcctatcccgagattcaaaagtgtcattttcgagaaaataaacgttctttcttttcgatattccaaaagctggcggtaaaagattgcctttgctccgactgcctgataacggactgtcatatggcggaattttttcttcttctcctccagccccatgaccatttcgccgtttttcttccgcttgatcatttctgcataggtatctgcaaattttgccgcgtcctcataataatctccattacacggcatccggtatgccaggatcacaagcaggatcgtcgtcagaaggtacagaaccatccctgtagcattgagcagatccggacttaaaagaatcagatgaaatgcagaaatctcccatccgataattggaatcatccgcaggatcggccagtcaaaaaatgcagaaactgttgcaaaagatacaccttttttccagaaatacagaacgatcagtcctgtaaccataagcagaaacaccttgatcccacggccgatccattctcttgccttctccgaaatccgttcactggaatacaggcagaccatcaggctgatctccagtgccagattacagatacagattcccgcaaacagcagaattctccacagactgacatcaaaaactgtaattcctgcgataataaatatcagaaagaacaccacactgctcagataattcatccaggctccatggatcagcacgacctttgggtccacaggcgcattgaaaataaaatgtgcatgtgccgggcggaaaagaattccttttctggatgcatatgacataaaattcagcaaaaacaaatacaatgaccagactgtcagaatgatcaccattccttttgcactgtcaaacttcatctgcactgctaattctgccagcatcacagccagaaaaacagcatatgccgcacaggctaacacaaccagaagtgtgagcggctttttcactgcttttttcaaattgttgatcatacttcgttttgtcagatacaatagcgctctcacgatttctcaccacctgtcatttcaaagaacagcgcatccagatccttgtctcccacctcatccttccggtaagaaccaatgatcttactcttttccatcacaaacatcatatcccacagctcttctaccatctccagcatatgcgtgctgatcagtactgtaactccgagagctttttgttccagcacgacctccttaagctctttaatcgcttttggatccagccccaccatcggttcatccagaagcagcactttcggcctgatggcaagcgcacagcagatactcaccttctgcatcattcctttggacagctcatttcccagtttatcctgcttgtcatccaggtcaaaccgggcaagcagcgcttccacctcttcatccgtaatcccgctgttgtaagcttttctcatgtattcaatgtgttctctgacgctgagtgcatcaaacatggcaggcatctccggaacataggcaaactgtctctttgcctccacacttctggcaggaagtccctgaattccgatccgcccctgataccgaagcagacctgcgatacttttgatgatcgtcgattttccggctccgtttggtcccagaaggatcccgactgtaccatccggtacaaaaaaactgacctcatccaccgccagagactttccataggatttacttaatttctgaacttccagcatatcatttcctccatcgtgttttacacagctcacagcctgtctgtgcaggcacagcagctgtctgacgggcttatcattactggtcacaccaattacggcttatcacgcaaaaaagattcccgttcattgtactgttgatttgatacaataatacgagaatcttttctgtttgtcaactctttattcgtctgctttttcctgtgtatacaatttgaacaatgcctgtgttccctcatctccaaggccttctgcctgcagctcttcatactctgccagcacctgacttaagacattgagatccagaccgcttatattggattcgatcagcgccagtttcatatctttgataaaatgcttcataaagaagcccgggcggtaatctccttccagaatcttcggtccgaacagatccagctgacggcttcctgccgcacctgtagacacagaatgaagcactgtctgcagatccaaacctttcgcctgtgcataagcaagtgcttcacatactccggagagcgcgcctgcgatcatgatctggttcgccagcttacagtgctgtccgcatcctgctgctccctggtagttaatattggttcccattgcttcaaacagaggcatacatgcttcaaaatcttctttgtctccacctacaaggatagaaagtgttcctgcttttgcgccggtatctcctccggttaccggggcatccagaacatgaaatccccgcttattcccctcttcataaatcttttgggcaatctgcggactggtggttgtcatatcgatcagatacgcgccttcttttgcgctgtccagaatattcccctgatcgaaatacacttcttccacgtcctgcggaaatcccacaatggtgatcactgcctcacagtctttcacgcagtctgcaatgctgtcatgaaaggtcacaccctctgcgatcacatcttctacctttgcttttgttcttgcataaatgtgcagatcaaatcctgcctttttcaaattccgcaccatggattttcccatgatcccgactccgataaacccgatctttttcattttattttccctcactattgtttttctacaacttcaccctgttttttataaatgcttttcgccggtacaaatcctctcacagaagaaagcggataaatgttcgtatggcttcccacaacggttcccggatttaagacacttccgcatcccacttctacttcatcgccaagcatcgctccgaattttttcaatccggtctcgatttcaccttccggtgtttttacaattaccagcttcttgtctgacttcacattggatgtaatagatgcagcacccatatgcgatttgtatccgagaattgagtctcccacataattgtaatgcggaacctgcactttattgaacaggatcacattcttcagttctgtcgaatttccgactactgccccctctcccacgattgcatttccacggataaacgcgcaatgtctgacctctgcttcttttccgatgatcgccggtcccgtaatggatgcgctttttgctactttcgctgttttggcgatccagatattctctccctgtttttcatattcctcttcgctgagtgtatttcccagttccacaataaaccgggagattttcggaagcacttcccacggataggtcactccctcaaaaatatcttttgcaattgtctcatccaatgtataaagttcttttactgtcagttctttcataaattaactctctcctttttgattctcttttttgcgcgatgtccggtttgacgataccggttttttataatattttgcagccgcatcgtaaaatcctttcagctgatattgattgttcagccgctttacgccttctgtcctgctgataataaaatgatccagcttctgcatatactcatcctgagtgatctctccgtctgccacatacgtcagtcctttctcccagctggccgtcagttccggattcaaaagcgaacgaatggactggttcaccacatcatacaccatctctccctgaagagtcggagtgatgatctgggtcttcttattcaggctcagatatttgatatggatcagctttttcagaatttccgctctggtggcactggttccgataccgcttcccttgatctgggcacgcagctcttcatcctcgatcaactgccccgcgttttccattgcaaggatcatggatcctgaattgtagcgcttcggcggagaagtctctccttccttcacatccagcgcacaaaccggcaggactgctccctttttcagattctgcaccacctggaaaaattgtggatccatgctctgttctcctccattttgcggaattcccactactttcagatacccttcttctgccagaaccttaaaatttgagaaaaagctctcctcccgtatctttacagtcaccgctactttctgatatacagcgggcggataaaaaatactcaaaaaccgttttacaacacagtcatacacattccttgccgcctgggagaccgacgaaagtgccgaaagtccctgtccggtcggaatgatcgcataatgatcggtaatctgtttatcattgacataacgggtctttaccaggttcttatacgttcccatagccgcgatttcttttaaatatactgccacgggcccgtattttgacagcccgttcagatttttactgatttcctttgcaacagcagtagacaacactctggcatctgttctcggataggtcaccagcttcttttcgtataattcctgcacgatccgcagtgtctcatccggactgatcttaaaccgcttggaacaatcattctgcagttccgcaagattataaagaagcggtgggttcttcttctctttcttcttttcgatcgccgctatctgtcctgtgacaggctctttctccttcagatatgcgatcagctcctgcgccttttctttttgtttgaatccattctctttgtacaggtcaaacgattcgaaatagcgggagcctttgaccgctttccattctccctcaaatgtttttccctcagcttccagagtcgcaagcacacgataaaatggtgtttttacaaattcacggatttcccgctctcttcgcactaccatccccagcacgcaggtcatcacccgtcccactgagactaccgcatactttgtcttcaaatatccagaaatactgtttccgtattttaatgtcagaagtctggaaaaattaatccccatcagatagtcctcttttgcgcggagataggccgaagcgctcagattatcatactctgataagtcctttgcctgccggatcccgcgaagaatctcctcctccgtctgcgaatcgatccagacccgttttctttgttttcctgtcacatgtgcttcctgctccaccagccggtagatatactctccttcccgtccggagtcggtacacacgtagatcgtgtccacatcctgtctgtttaaaagggagctgacgatctggaactgctttgccactcccgggatcacttcatactgaaactcctgcggaagaaacggcagtgtgttcaaactccattttttcagtgccggatcatacacttccggataactcatggtcactaaatgtcccacacaccaggttacgatggcttcttctgattccagatacccgtcctttcgctttgcatttaattttaaagcctttgcaaactcctgcgccacacttggcttttctgcgatatatactgctttccccattcttatttatacaatcatctttctgtttattctattctttctgaaacaaccgtctcatcttctgaagaaacgtctgtttctgtggtttcttctccactcgttttgccatcagtgcttctttcataaagatttcctgtgaattgatggcttttccttctaccttctttttgcggtaggttccgtcacttgtcatcactcttgctttgacattatctgcaagcattacatgcaggtttctcaccagccgttttttgatctcctcgttgagaatcggacatgccacttccacccgtttctccgtgtttctggtcatcatatccgcagaaccgatgtacactttctgctctgctcccgtgccgaacacaaacactctcgggtgttccagatagcggcctacaatactggtcacagtcagattctctgtctcttgtgcaattcccggcagaatacagcagattccacgcacgatcagatccaccttcacacctgctctggaagcctctgccaccttccggataaaatccatatccgtcacagaattcatcttcatcacaatccgtccctgttcacccttttgaatctcttcatccatcaacgccagaatcttctgcttcaaactggtcggagatacgatcagattcttataggttccatccagattgccaatggacatattcttaaaaaatactgctgcatcctctccgatcgactgattcgcagtcatcagcgaataatccgtgtacaattttgcggtcttctcattgtaatttccggttccgatctgtgtgatatatttgatctcatttttactgcggtatgtaatcagacaaattttggaatgtactttatatccgtcaaacccataaagtaccctgcagccggcctcttccatccgttctgaccattcaatattattctgctcatcaaaccgggcccgcagctcgatcagagcggtcacttcttttccattttctgccgctgcacacagatattctaccagtcttgtctttttggcaagacgatagatcgtgatcttaatggtcatcacatccggatctgtggatgcctctttgatcagcttcaaaaacggatccatgctttcatatggataggacagaagaatgtcccgtttctttacctgagccatcacgcttccttctcccacctgtgcggcaggctgtggagcaaatggtacatcaaccaatgatcgtttcatggaaacaggtactttatccataattgaaaagatataatccagtttcatcggaattttcgttctaaaaatgcaggcaggcgtaattttgaatttctcacagagatatttctctgtctctttattcagcggattggccacttccagacgtaccactgccattcttctgcgcttattcaatgtctccttcattatatagcgaaagtcttcattgtccgcatagttctcatcgtcaggagaaatgtccgcatttcttgtgacacggatgtatgtgatatccgatacctgatactgttcaaacacaagatccagatactccatgatcactttttccatccggatataacgaatgtcatgtcccggcagataaatcacatctgaaataaactgaggaacaggaacgatccccatcatttttttctcttcaaaacgaagcgttgcgatcacatacagttctttattgagcaaatgtggaaacggatgatttgcgtctacgatctgtggggaaagcagtggaagcacctgttctttgaaataatgtttgacatactttttttcctgtgcctccagctctttgaaatccagcccacagaccccgtatggatgcagctgtttttttatctccgcatacgtcttatcccgctctttataaagcggggccactgcctcataaatcttatctaactgttctttcggagtcatccccgatctgctgtctaatgtcttgctgtccacagatgccatatcgtagagacttcctacccgaatcataaaaaactcatccaggttactggtgaagatcgatacaaatttcatcctctccagaagcggaacactttcatcttgcgcttcttccagcactctctgattaaagcgcagccacgacaattccctgttctgtgtgtaattcaaaatttcttttttcatatgtttctccttctgccggtttcacatgaatactccacattgtatcatgttttccatgcaaaatatacctatttttcgagatactccatgagacggtcatactctctttccatcagatcatatccgtgatgataaaatgccatcagatgctcctgacttctctccagtctggacaccggctttacctgcggccggatcacaaaaatctttccttctctctccagattctccagctcattcagcgtccggttgtaatacggcgcacgccgcaaaagagtccgcagaagattcggataagatctgtaggctctgcgatacatcttttccaccgcttttgaaaccgccttcttgcgatatccccgatttcttgtcagaacaacgatgatcttctcatttccaatatccatcgctctccgaatcggaatagaatccgcaagtcctccatccagatacgggatcccatcgatatttacaatcggacaaagcagcggcatactggaggatgcccggcagattttcatcagcctgtcgggatcttgcgcctcatccatgtactccgcttttcccgtcacacagtttgtcgtgaccagctcacagttcatctctgatcgaaaataggtggcaaaatcaaagggataaatctgttttggataaatatcaaaaatcatatccatattcatcagacttttttcttttataaatttacgcatcccgtaataataggacagattcttatctgtggggatcatacagtctcttgtccgtccgggctgccttgacacatagtccaccgcattgcaggctcctgccgaaacaccgatcacatgagaagtgtaaaactcctgctccatcagataatccagtactcccgatgtaaatacgcctcttgttgctccgccttctaataccaaagttgctttttgcatatccatccctcactttctttgttccattatatactttttccactttttcgcaaactcctaatcctgttaaatttttgcaaaaacacaatatttctttgtttatttcatagaaagcatactcctgaccttgccatgtcgtgggttctcatgttaagataagcgttggaattattactttatataataaataaggagtaaaaaatatgattagtgcaaacaatatcactctgcgcgtcgggaaaaaagcgctgtttgaagatgtcaatattaaatttaccgaaggcaactgttatggtatgatcggagccaacggtgccggaaaatctacttttttaaagattttgtccggacagatcgagcctaccaaaggggaagtaaacatcactcccggagagcgtctttctttcctgcagcaggatcactacaaatacgatgaatatctggtactggacaccgtcatcatggggaatgcacgtctgtacgagatcatgaaagaaaaagaagtcatctatgcaaaagaagatttcacagacgaggacggaatcaaagcaagtgagctggaagcggaattcgcaaccatgaacggctgggaggcagaatctgacgctgcaactctgctcaacggactcggcattgaaacagacctccactacaaatacatgaaagacttaaagggtgcagaaaaggtaaaggttcttcttgctcaggctttgttcggtaatcctgacatcctgcttcttgacgagccgaccaaccacctggatctggatgcgatcgcatggctggaagagttcctgatcaactttgagaacacagtcattgtggtatcccatgaccgttacttcttaaacaaggtctgcacacagatcgcggatatcgactatggaaagatccagctctatgccggaaactacgacttctggtatgaatccagccagcttctgatccgtcagatgaaagaagccaacaaaaagaaagaagaaaagatcaaagaactgcaggactttatttcccggttcagcgccaatgcttccaaatccaaacaggcaacatccagaaaacgtgccctggaaaaaattgaactggatgagatcaaaccatccagccgtaaatacccttacattgatttccgtccaaaccgtgacatcggaaacgaagtgctgaccgtggaaggactttccaaaaccatcgacggagtcaagattctggacaacctgacatttacactgaaccacgatgacaaagttgcatttgtaggcggaaatgagcttgcaaaaacagttctgttcaaaatcctgatcggtgagatggaaccggatgaaggtacttacaaatggggaatcacgacttcacaggcttacttcccgaaagacttcggcggagagttcgataacgattacaccatcacagaatggctgacacagtactctgaaaacaaggatgccacctatgtgcgggggttcctcggaagaatgctcttctccggagaagatggtgtgaagagattaaaagtcctctccggtggtgagaaggtacgctgcctgctctccaagatgatgatttccggcgcaaatgttctgttattagatgaacctaccaaccatctggatatggaatccatcactgcgctcaataacggtatgatcaaattcccgggagtactcttatttacttcccgtgaccaccagatcgtgcagacgactgcaaatcgtatcatggagatcgtaccgggcggaaaactgatcgataagatcacaacttatgacgaatatctcgaaagcgatgagatggcaagaaagcgccagacttacactgtcgagacagaagaggaagattagaacattaaaaatacggaaagaatccccggatgttgggttctttccgtatttttgttttaataatatagtttatcttcttcgataattttggggatgcccccctctacttccacgatcgtcaccgcacagttctttggcactcccatctgccagaattttgccggactccattcatttttgatacagtttttcattgccgtgactgcagcaccatgcgtagaaagcaaaatcatcttatcctgcaattctggattttgatataacgctttcagaaagccgtccactctctccatcaactgtccaacggactcaccctctccctttggaatgtaatttgcagtatcatcaaagaacttcacaaactccgcactctgcggatccagaccttctcctcggtacacaatgccttcataatcaccaaagcagatctcctgtatctgaggttcctcgatcaaggggatctttctcccctgcaaaacaatctgtgctgtttcttttgctctggataaaggggacgtatacgccagatcaaaagaaatccccctcagtccttctgctgtcttttctgccagttctcttccatatgcattgagaggaatatctgctctcccctgcactttcttcgctttattccaatccgtttcgccatgtcgtaccatatataatctcaccgttgttttcctcctaagatatgttcttttatccgatcactctgtcccttagtatacgcatatttcctgtctcccgtcaaccgttctttgttcctttccgcttgcaaattcgcctgattttgtctataataatgacacataaaaaaacaaggagattaccatggaaaaaattacaagctttacgatcgatcacatcaaactgactccgggactttacgtttccagaaaagatcttgcaggagataccccggttaccacgtttgatatccgtatcacaaatcccaatgaagaacctgttctaaatactgcagaagtacataccatcgagcatcttgccgctacctttcttcgcaaccatgcagaatatggcccaaaaacactctatttcggaccaatgggatgccgcaccggattctatctgcttcttatcggtgattatgaatcctgcgatattcttcctttgatgaaagagatgtttgcttttatcgcatcttacgatcaggaagttcccggagcctgtgcaaaagactgcggaaactttctggatatgaatctgccgatggccagatttgttgcacgaaaatacctgactcaggttttgaataaaatcaccgaagagcaactcgtttatccacaatagaacaggagcatatcatggggaaaaaacaaacatttgcatctgatacttcccagcgaagtatcaccgactggattcgtgcactcctggttcttcttttggggctgatcattgcgcatcttggtgttacgctctttttgctctcggcacttggcaccgatactttcacagtatttattcaggggttatcccgggttgcaggattgtctgtcggaactgtgcacgtcattgttctgtgtattttgatggttctgatgttgttaacaaccaaaggatatgtcaaacctggaaccattgtctgtgcattttgcggaggccctatcattgactttttcacctggtgtttcaaagaatacatcaatgcttcttcaggaatgccggttcgtatcatcagcgttctggtcggatgtgcgattctctctttgggaatgtctgttgtaatcaacagcaatgccggcaccggaccgaatgacctggttgccatcatcctctccgacaaactcgaacggattgaattccgctgggtacgaatgggatgtgatgctttctttgtaagcctcggatttatccttggcggtacagttggtgtcggaacaattatcgccatttttctgacaggacctatggttcagttttggcttccaaaaacaaaagttttactacaaaaaatcagagtgtaaagcatcatgctttacaccctgattttttatcacctttttttaaaacttcctgacggatatacaaaaaagttttctcctcaccctgttttgccagcatgatcaacagtttttcaagcagcgcttctgtttcctcatgcatcagatactgcccttttcctcccaggaagtaatccagcggatcccggtctgtataggcagctccgcgatataccttacttgcagcaattcggtccagaaacatctccaccacataattgaccggcattttcattccttcgagcacggcaccatgcgttccgtaatcaatccagtattcataatgatgcttattgcgccctttatgatgcagccaggcagaagaataccccttttcctcccgctctgcattattcggacttctggttccctggtaatatcggcatcccacacgaaattctgtccagccgtattttgacagatcatggagcagcccctgtctgtacaaacctacctgaaagcatgccttcatcacaaggagcttatgttttgtgatcgtaccaaaatgtcggagtgcgttcatctctgaatttcctttctatctgccttgcagcagaattattgtccttgcctttacctctatcatcttctgctctttcagacactctgcctcatccggcatctcttctgttcctgcaacctgataccatttcatttcctttttcagagccggaagagcaaattcgtgtgcctcccagtgcatattatatgcgacaaaccagaatgtatcttcccagctatagagaaccccaagctgtctgctgaccaccgcatcctgtacctgccatgcactttctccgtgataagagacatccggaatcccgcacgctgtccgatccaggccaagcagtgcctgtctttgatgaaagacaggattggatttcctaagggcgatcaatcgctttacaaaccgaaacagatcttcatagcttttctgtcttccccagttcagccatgcagtctcattgtcctgacaatacacattgttattcccatcctgcgtgtttccaaactcatctcccgccagaatgcacggtgttccctgcgaaagcagaagcagaagaaaggcattcttcatctgatttttgcgaagtgtcatcacacttctttttctgctcggtccttccgtaccgcagttccaactgtaattataatccggaccgtcctgattgcgctctccgtttgcctcattatgcttcccgtcataagagaccaggtcacagagtgtaaaccctgtatgtgaagtaatgtaattacagcagccgtcttctggggtccggcggcagagctgtcgtatcacttctctgaccatgccttcatctccctttaaaaacctgcgcatactgttctggaatccctcttcttttttgaagatctttgctccctttaagatcggatccgcattcagactgtcccatggcacattgtaaggattcaccacaaacccatccacatgatactccagaaggtaaaaacgaagacattccaacgcagtctgcggaagaatcttttctgtaaacggcatttccagaacaacttcgattcctgctttgtggcacgcttttaccagatcttttaattctgtctgtgcatcatcaaaagctgcatatgcggctttcggcgcaaaataatatccagtgccatagccccagtaattccggtaacttcccatatcttcctgaaattcatacaccggcatacactgaatctgattgatgccaagctctttcaaatatggtaatttttcccggacacccagaaatgtccctttatgctttactctggaggaagagtgcatcgtaaagcctcttacatgcagactatatgcgatcacatcctgcacaggaatctgcggtcttttatccccttcccagtcatatcctctctgcggaaatcttcctcttgtctgatgccggttgaattcccagccggtaccgaacattttatgtcccgcgatctctctcacgtaaggatccagacagaccgttccgtcaattctgtaattatactcatactgggtttcctccagatcttccagcgccaggaaacggacttctccgattccttcttctgccggcatttcgattacctgatgtggttcactttcgccctttttatacaaaagcagttcacaagatacgtcttttggaacacataccgcaagattcacacttctgcctcttctggaagctcctaaaggctgtggatatccttctgtttttttcatatatttattcctcactgccagccatttgttccatacatctcaacattatctttcccgataaaaaatgtatcgatatacgttgttttctcataatcctcatcattcaaaatagcctctccgatctttgccgcctgttttccaacattgatcggcgactgcgctccggtcccggcgatcattgacttttcatctgtaagttcacttttcatctccggtgagccgtccactccataaatcttcagactgctttttcctgcctcttttgctgcctgaagtgcaccgagtgccatctgatcatttccgcacatcacagcatctacctgtggattttctgccaaaatctgtgccattttctcctttgcactctccttggtgccgccggcatctgcacgcgccactacttcaaatcctgcatttttgatcgcttcttcaaatcctgtgatacgctcattcactgagttctggaacgggcattccaaaagcactacttttccgccgtccgggcactgtgtcttcaaattctcaccgcagactgcacctgcatttttattgtcagagccgatataaacagctgtcagatctgtatccttcacctgcgtatccacattgatgaccggaatatctgcctcatccagggcttccagagcaggcttgattgcttcccagtctaccggtgcgagaaagactgcatccactccttcatcgatcatctcctgaatctgctggatctgcttattcacatctccgtccggattttttaccaccagggtatctccctttgcttccagttcccctcggatcgattcttttacaacatcataatatggattataaatatcaatgcagctgtagccaaatgtgtgcccttctgatgtttctgtatcctgtgcctgctcgtcctcattttctactacagcgttatcttccggtgtacccacattctttttgcatccggaaagtaccatacaaccgaacataactgtcacaaagactcccaaaatttttctcttcatctattgtcctcctgattgctaagactctgtttttccaacatatatgcataatctattttattctaccctgtttttcagcattgtcaatagaaagaacctgatgtttttcttgctttttcctctggtttttgttagagtaggcatatcaagaaaaaaggagaacgtgctatgagcgaaaacatgaatgaaacaatgaatgaaaacgaaggtgtaacagttactctgacactggacaatgacgagacactggagtgtgccgtcctgacgatctacgaagcagccggcagacagtacatcgcactccttccgctcgatgagaacggagaagagtccgaagaaagcgatgtgtacatctaccgtttctctgagacagaagacggtgagccaaacctggaaaacatcgaagatgacgacgagtacgatgctgctgccgacaaattcgatgaatggatggattccctggaatttgacgagatcgatcttgacgctgagtaagtcagacgccctcgaacagttcctctacaaaacgggaaggagagatctcctttccgttttttattttcacatatgtgattttcagcacatcttttgcccgggtcattcccacatagaacagcctgcgctcttcttctacattctgctctttctctgctttctgataaggaattcgtccctcgtttgcctcgatcaaaaacaccgtatgaaactccagccctttggacgcatgcagtgtcatcagacgaaccccctcctggttctgttctttttgctgttctttctttttcagcgcttccgtatattcttccacatggacaaaccactcttccatcgtctgaaacggctttgccgcctcttcaatctcagagagtacttctcttaaatccgcagctttcatgtttttcgtagtcgcatattcccgcagaaattcgtcatatccgatttttttcttcaaatactggattgccgcatatggggccattttcgcaagcattttcaaatcccattcaaactggtcgatccggtcctgcatccactctttatcacaatagaatttgtgcatctcctcaaaagaaaccactcttccagggaggcagtctcttcccagataccgtttcggacgattcatgacctgaaggaaatctttgcgctcacgctgccccattgccagcctgaaatatgccataatatcttttgcaataaaatgattgtacagattcggcagatgttcccgcatctggaatggaatcttttcatcgatcagcgcttccacaaccgccctcgcatctgtgtgaacacgaaagagtactgcgatctcctctgccaaaattcctgtttccatctgttttttgatctgttccaccacataagaagcttcctccaccggatctttcacttcctgtacatgcagtgtctccccactttctttccacgcccggatttttttgtcaaaccgtacctcgttgttggcgatcactttcagagaatttttgacaatattttccgaagaccgatagtttacatccagaagaagctgttttgcatctggaaaatccttctgaaactgaaacatcagtctggaatctgctccgcgaaatccatagatcgactgatcgtcgtcgcctacaacaaacagattgttctgcggcgccgcgagcatccggatcacatcatattgtacctgattgatatcctgaaattcatcaatcagaatatagcgaaacttctcctgccattttttcaaaacatccggcctttttataaacagatcacgacacaacagaagcatgtcatcaaaatcgatctttcgctcttcatttcgctttttttcgtattctccgtaaatctcccggaacgtctcttttccgcagatcgttgtctcatactcttcaatcttcagtccgttgttttttacaatgccaatctctgaaataatctcttttaagaaatcctcctcttcaaattcatcaatctcttttcgattgacgatctgaagcagcatctgccgtttttcttcctctgacagaatattctccggtccgaaccgatatgcccactttaaaatcccataataaattccatgaaatgttccgaatgtgacagcagggcgagtccccttcatcgctgaaaaaaagcggttcttcatctccactgctgcatatttggtaaatgtgatgaccagaatctcttccggacttacatgatacgtctggatcagcttctggatcctgcccacgatcgtgagcgtctttccggaacccggtcccgcaagaacaagacacggtccctcattgtgagagaccgcctcctgctgagcctgattaaaactcataaatacctctttctaatttgcctggagtaatgcgataccggcacggattctctttaaggattcttcctttccgagaacttccatcagttctgtcgcaccgcccggtgtgttctgttttccggataccgctgttcggatcggccacattacaaatccgatcttcactcctttttctgttacatatccttttaatgtttcaaacaacgcgtcattgctgtaatcttcctgtgcttccaggatcggaaggacatcgtttaaaacttccagagaattctctgcatttgtcttcatcttcttgtgtgtatacatagcagtgtcatactcaggcagctcttcaaagaaatcgatctgatctttaatatccgggaagatttcaattctggtcttcaccatcttcgcaatctttttcagatcatagtcttttgtgatgacttctttcagatacggctctgccatctcatagaacttgtcttcctccatggctttcatgtattccccgttcatccatttgagttttaccggatcgaatacagccggtgacttgctcatatggcggtaatcaaatgcctctaccagatcctccagcgaaaagatctcgcggttgtccgacgggctccatccaagaagtgccacatagttgaccactgcttctgaaaggaatccctgctcgatcagatcttcataggaagaatgtccgcagcgtttacttagttttttatggttctcatccgtgatcaacggacagtgtacataaaccggaatctcccatccaaatgcctcatacagacggttgtatttcggtgcagaggaaagatattcatttccgcggacaacgtgtgtgattcccatcagatggtcatcgatcacgttcgcaaaattgtaagtcgggaatccatcggatttgatcaggatcatatcatccagttctgcattcggaaccgtgatatctccgtaaatctcatcgtggaatgtggttgttccctcattcggtacgttcagacggatcacccaaggttttcctgctgccagattggcctctacctcttctttgctcagccccagacagtgcttgtcatacacaacgatatctgttccgtcttcagaaacagaagtcttcagggaatccaggcgtgctttatcacagaagcagtaatacgcgtcgccctgctctaccagctgctttgcatacttcaaatacactccggaagcatttctctcgctctgcacatacggaccatatccaccatccttgtccggtccttcatcgtgaatgagacctgtcttttccagagtacggtaaatgatgtccagtgctccttccatgaatctctcctggtctgtatcttcaattctgaggataaagtctccaccctcgtgttttgcgatcaaatatgcatataatgctgtacgcagatttcctacatgcatccgtcctgtcggacttggtgcaaatcttgttcttactttactcatctttatcttctccattttctatttacgtcatcttttctattatatcttaactattccgccttgacaaggggatgtgaacccggaaaatggcatccacaataaaaattgccagtgcaatcatccccgcaatctccagtgtctgcagcagataataggcacatcctgccctgtcattggcaacgatagaataggcaattctgtacattccggcccccggcacggtcggcaggattcctgcaatcagaaacaccgtcaccggcgctttgaaaatccttgcaaaaagatgtgccataaacgcaattgccagcgcagaaaagaaagaagccggcaccacatccactccacggtgtgtacaaagcagataaacaccgcctcctattgctccgaccacacccgtctgccacagatattttccgggtgtctccaaaagtacagaaaacgcaatgatcgcaacaaaacttcccaccactcccatcaacacactcatacgatacctcctacaaaaatcatcccggtacctgctccaagcccgattgcagctgctgtcaaaaatgcctccagtatcctggcacctccggaaatataatccccccgcagcgtatcccggatcgcattggtgatcgctacacctggcaccaggggcatcagagaactgatgatcacgatatccagattccagccggatgtaaccctattcacacaggcagctgtcactgctaccccgaatgcacagattgcattcaaaataaagctgctcatctggatttttttgcccagtgtaatcaaaaatgccaggatacatcctactgccgcagagaccagagtctctttcactccccctccaaaaagaggagcaaacccgaccggaaccagaatcgtcgccagattatataccgccaccgaatactgttttcccttgatctgtttcaactctttatatgtttcctcaactgtcatctctcccctgcagtatcttctggatatttcatttacctgcacaatacgatgcatattcgtcccgcggtcatgaactctgcgcatagcggtgagcatttccatgtccggattatccaaagtagcaacaatccctgtcatcataacaaatgcctctgccacttctgttctcgcggtgttgagaatatgcttcatggtatcctccacacgataggtctccgctccacttctgagcatgatttctcctgcaagaaccgcaatattcaatatctgtttatattccattcttcccctccatgatctcgcagcctgccccgtctccgaatattccttcatcacacaaaatcgaaatacagtttctcatatctattttatccaggtttgtattggcaaatgcagatgcacggatcgaagtcacatcctccggcatctcaaaaattccagttcttccggcaggaaacgctgccagctctgttccggaaaataaaatcccatctcttgccgtatattcacctgtgcctcctgcttcgatccatgtcagttctcccagttcagaaaacgcaccgttttctatattctgaatattctccggaatataaatttcaaaaatgccggttccaactcccgaaaacgttcctcttcgaattccaatacaattttctgacggcagttccagatatccatccatcatctcgctttttgcagggtcaaatccacagatcattccctcctgatcaattttgaacccctgataatatatatacgcctctgccggagactcttcctgtgtcatatcttcccctggtaaggtattcacaatttcttccggcatcgtctcaggaatcactggctgtatggtctgactctgcactgtctccaccggttctaccgcttcttcttgtggcatggctgacgaagcttcagctactttctccgtttctatctgcacatgtttctccatttctgccagtgtataggtccggatactctcctgttttaccatctgtcccaaccggatcggaacactccatcgtatcgtttcacccgcagtcgcagcatatgacctcatatcttcctgtaacggtaccatactgacggcatcaccgattccaaccaaaaggctgaccgtcacaactcctgcaatcactttctttaatccatccggtatgttccagatatgctgtttctcccaaacgcaatcgccacttgttctcattctttttccattctccctgctttttctttggtatgcgaaaaaggaatgctgctcttttgcaacactccttctcctttgcctgttatggcaaaactaaacattgatctcagcttttactccgagaatttctttattttcctccagaagcggataaatcacattatttaagtacgactctacctgctctttcgcacggcctacatatttctgcggttccatcgtctctttcaactcttccagactcatgttgaacgcaggatccgctgcgatcaactccagaagattgttgtccagacctttttctttgacattgcgtccggcttccatggaaagctcacgaattctctcatgcagctcctgtctgtctcctccggcttttaccgcatccatcatgatattctctgtcgccataaacggaagttctgacatcagacgtttctcgatgactttcggatatactacaagcccgtccacaacattcaggcacagatccaggattccgtcgattgcaagaaatccttccggcacactcagtctcttgtttgcagaatcgtccagtgttctctcaaaccactgcgtcgcagaggtgattgccggattcaatgcatcgatcatcacatatctggaaagagacgcgattctttcacttctcatcgggtttctcttatatgccatggcagaagaaccgatctgtgtcttctcaaacggctcttccacttctttcaaatgctgaagaagtcggatgtcattagagaatttgtgcgcacttgccgcaattccggccagtacattcaatactcttgtatccacttttctggaataagtctgtccggataccggataacatgccttaaatcccatcttttctgcgatcattggatcgatcttatcaatcgtctcctgatctccgtcaaacagctccagaaagcttgcctgggttcctgtcgttcctttggatccaagaagttttaaacttcccagaacataatccagatcttccagatccatctcaaattcctgcagccagagagtcgctctctttcctaccgtagttggctgagccggctggaaatgtgtgaatgcaagtgtcggctgacatttctgtgcatctgcaaattttgccagttctgcgatcacattgaccagttttgttctcaccagctttaaagcctctgacattacgatcatatctgtattgtcccctacatagcaggaggttgctcccagatggatgattcctttcgctttcggacactgcacaccatatgcatacacatgtgacataacatcatgtcttactactttctcacgctcttttgcaacatcgtaattgatgtcctccgcatgcgctttcaattcttctatctgctcgtctgtaatattcagtcccagttctttttctgtctctgccagtgcgatccagagttttctccaggttctgaactttttgtccggtgaaaagatgtactgcatctcacggcttgcatagcgctcggacaacggacttacataacggtcattgctcataatcgtattctccttttttcctattcaaatgccagactgatatcttctcccggcacctccatcggataatttcctgtaaagcaggcatcacaaaacttcagatcgcctaccatatcttttaatttttctacttccatatagcccagagagtctgctccgatcatctcacggatctcctctgttgtatgagagtgcgcgatcagctgctcattagacggcacgtctgttccgaaatagcacggatgtaaaaacggcggagaactgattctcacatgtacttctgtcgctcctgctttctttaacatcttgatgatatttgcacaggtcgttcctcgaacaatggaatcatccaccataacgatccgcttcccttttaccacttccggaatcacgttcagcttgatcttcacactggacacacgctcactctgtttcggcttaatgaatgtacgtcctacataactgtttttatgaaacgcggttccataaggaatcccggactgctgtgaatatcccatggcagccacaaggccggaatctggaacaccaaccaccagatctgcctctaccggataagactgtgccagtgcttttccagcaacaattctggaatgatagactccgactccatcgatcgtactgtctgttcttgcaaagtaaatatattcaaaaatacatctcgcacgtttttcttccggcagcgccatactcatgtccgaagacatgccatgctttgtaatacttacgatctcacccggaaggacatctcttacaaactctgccccgactgctgcgatcgcacagccttcagatgccagaaaatacgtattgtcccgttttccgatacagagtggtttcaatccgaacggatcccttgccccgatcatctttctcggactgctgatcaccagcgcataggctcctttgatcttcttcatagcattttttactgcatcttctgccttagaaacattcagacgctctcttgccacatgataagcaataacctctgaatcaatagtcgtctggaaaattgcccctgtctttgacaattcctcccgaagctccactgcattgaccagatttccattatgtgcgatagccagagttccttttacataattgattaccagaggctgtgcattctccacacgggtacctcccgccgtagaataccgtacatgtcccactcccagatttcctttcaattcatgtaacatctcttcgttgaacacatcatctacatgccccaaccctttacgggacagcaccttgcgctgtccgtatgtgtcagttactgcgatgccgcagctttcctgacctctgtgctggagtgcaaagagtccgtaataaatggaagacgcaacatcctgtccgtccatatcatatgcgccaaatactccgcattcttctcccagccctgttaccactttttcaaaatcattcatggatgaactccttctatttaattccaatacgtctgaagacttcctgatatgcgtcttctacatttcccatatctctgcggaaacggtctttgtccagtttttcatgggtctctttatcccacagacgacatgtatccggtgaaatctcatctgcaaggatgatctctccgtggaaacgtccgaattcgattttaaagtcgatcagttcaattcctgcctcatcaaagaattttcttaagacttcattcactttgaatgtgtactctgtgatcttgtcgatctcttctcttgttgcagctccgattgcaattgcaaaataatcattgatcatcggatctccaagatcgtcatttttatagctgaactctaaagtaggtgctaacaattttgttccttcctcgataccgagttttttagaaaagcttcccgctgccacattgcggacgatcacttcaagtggtacgatctccactttttttacagctgtctcacggtcgctgagttcttctacatagtgagtcggaacaccttctttttccagaacctggaaaatgtagtttgtcatacggttgttgatcacaccttttcctacgattgttcctttcttctctccattgaatgctgtcgcatcatctttatagtctacgatcacaacgtccggatcttctgtcgcaaatactttctttgcttttccttcgtaaagctgttctaattttttcatacgttcacacctgtcctttttcttaaatttcattcactcgatctgggattatcggcacatcccgcagatagattataatacaaggcagagggaaaatcaatattccctctgccttgtatttcctgtggcttattatttatttctcaacagataaataagatgttcttatatattgtgctttatttatcacttttcgcaatttttgttctgatttttttgcacattttctcactttgctgcaagcggttttttcagcagaacgattccaagcattgccacgacagaacctgccgcaacggcagccagaaacagcagcggatcggaagctgcaaacgggattgccccctctgtgataaaggaaagtcccataatgaaattcgttgccactgtctgctgttcattctttgtaaaccggtttttaaaaaacagtgtcgccagagcaattccgatcggcggaaccatacctccaagcactgctccgagcaggactctgctggattctcccatacttgccagcacctgattcagccactcattgaacgctccgaccggcggattgaccacaaataccataagggctcccattgccgcgattcccaaaaacggatacaaaagcatcggctttgttccctccagcgcttttggaagcttttccagaattttctttaaacagcatgatcagtcctgccgcaaaacctgcgatcagtgcgccaaagaaaccagaagacacccagccggcctcctctgcagccattgtcataccgctttttgccagaagacctcctacgattccgggcatcaatgccggtctgtccgcaagcgccatggcgatatatcctgccagaatcgggaacatcattcgccttgttttccaggctttccgccgccatatatgtgtgggcaatccctgtgggacatgcagtaactgccagtacccggtatccctcttccggctgatcctgcgtctgtttttcttctccgtactcttcaggaaatttctttctctccgcctcatcaatgtgtgccagaaattctgttacatccgctgcatccagcagatttgtccgaaattcgtcatccattaaaagcatggaaagacggctgagtacttccagatgcacattatcttctgtattcggtgctgcgatcaaaaaaaatcatatgtaccggctgtccgtccagtgcatcataatccacaccctgaggaaccagcatcgtagcaagacccggtgcactgacggcatctgtctttgcatgaggaatggcaattccctctccgatccctgtcgttccttcctcttctctctttaacacaccttctttataacgctgtagatcgttgatatttcctccttttgccatcagttctaccatctgatcaatggcctgtcccttactttcgggtgttctggaaagctccacactttctctcttcaaaagatccgtgattttcataccttttccctttcaaatctgatattcgctgtacggtctgtccagcagttttacaatatcctccctggatgccagccaggactgaaatgccgtcgcacttcccgctgcagttccaagctccagtgcacgctcataagagccagtattgagatatcccgccagaaatcctgccaccatagaatctccagcaccgacagaatttacaaccgtgccattgtgcggctgctttttgtatatctcaccgtcttctgtcacaaggatcgctccgtcttttgccatagaaaccagtacatttcttgcacctctttcctgcagctttttcgcatgagcgatgatctcttcttctgtagtaagcgtcgtctggaacatttctccaagttcatgattgttcggcttgatcaaaaacggatgatatttcaatacattcaacagcagatcttttgtagcatctaccacaactttgacatccttatctttcaaacacatcagaatccattcataaatattctccggcagagtcgacggaatactgcccgccagaaccagtacatctcctgccttcaaggatttcagcttctcaaacaactcctggatcgctgtttctgtaatctttggtccttgtccgttgatctctgtctcctgtcctgcgttgatcttgacattgatccttgtctgcccgtctgcaagcggtataaaatctgtctttgcgccaaactccaggagcatctcctgcaatgcttttcctgtgaatcccgcagtaaatccaaatgctgtactctccagacccagattggaaaggatcacagaaacattgactccttttcctcccggataaactgcttcacttgttgtccggttgatttctcccggcaccagctgttctgcctgtactacatagtctaatgatggattgaatgtcactgtataaatcatgattctgcctcctctatattactgcatgtttgaaataccggatcactgatatgatccgtaatgatctgtgcatcttcaaacctcgcaaatgtgacggatgatacatgaccgaatttgctcgaatctgccagaacatatgcctctctgcatctcttcattgcagcttcttttaccagtgcttcgctgatatccggtgtcgtataccctttctccagatgaattccattcgtgccaaagaagccttttgtaaagttatacttattcagccactctaccgcagctcctccgactaaagcctgtgtatcctctttcagctcgcctcccggcaaaaacacccggcagcctttttctgccagacactttgcatgcagaattccattcgtcacatacacggcctccctctctgaaatcgcctctgccaatgacgctgtgctcgttcctgcatcgatataaacaaaatcctcctgaccgatcagagccgctgccagctttgcaatgctgcgtttttcctctacatacagcccctctctttctgaaacctttgcatcctttgtcgtatatgccccattcagtacagttgctcccccgtggactttcaacaaggctcctcttttatgaagctgtgtcaggtctcttctgatcgtagactctgaagtatccagaagttctgtcagctctgttacagtcactgtttttttttcgtttacgatcttaagaatttcgcgaaaccgctcttctgccagcattttcctcatcctttctttcattttcaatcattttcgtttcctttatccttataatataatcattttcagttaaaatcaatcacattaattcaaaaaaatatccaaatctgatcactctgatttggatacttttactaaatactctatatgtgactcctccggtactgctgtttccacttgtctgtcagctgctctgacatctccatctggattccttcccggatttctttcatctcgctgcgcagctctgtattgatctccgcataggtgtcatttttcgtaagaaggatatgatactcctccatcgacatatacttataggatgcatacaaatacggctttaacagctttggatcttcacagatctgatatgccctgtcatacatccgcgccgcctgctgataaaggaacattcttccataggcagaccccagacttgcatagatctttccataaaacttcggatccgtattctcatcctccccttcatttaagatcgcctgatacacaagaattgcttcttccacttctccactttccagaagattgtctcctttgtatttctgccgttcaatgtccttctggtttttgagccgctccagaacattctggatccggatcatctccgcttccttgtagattccggaactcttcaaaatcgtgagcacaaatttttccacacttccccgcatccggatcacatctcgaagctggtctgcaagctcccttttcccgatgtcctcttccagccatccgcacagctgctcgttcataatcgtataatcgatcaggtagagattattgcagagataatagcacagttcttccattgtaaatatcttacagtggatcctcgtaatttcatacggatgggccgcatgctgatcatgacatagaattaaacttcccatcatttcctcctaaatgtatcatcttctcttcctgaaaatcggtcggcgggaaaaactctccgaatcctacatcccgcaccgtgatcttacatgttttttcatctaaaaataacgtctcgatctgaagcctcatggaatactcgcctctcttgggaagccttccaagcgggatgacctccgtctttaacgtaccctgtaccagagactcaatatgaagctcgatatcttctgtatcctctaaaagcacttcccactgattgttggattcataccagtgcgatccccaggatacgatcggataccacatctcctgtccattcacccgcatattcacactaatctgatctgtcagcttgtcttcggaaagataaaccggatcctcaatgtgcataaacatcttgcggtatgcggtatagcaggcgcccttgctgtacagattgtttccgataaatgctcttcttccattgcacaggactctcagagaagtcggataccagttattctcaaatccctctccggtcagaaagaccgaagatacgatccgcttgtcaaacacgccttcaataaaccggcagaatctcatatccgcatcttttgccttgtccgcattgagcaccggatacacggctgccagttcttttatatgcgcacttgccacttcgtccactgtcacaaaaatcgtctttccgcctccaagccccggcttcagccttctgagcatatacgctttgatctcatttctgtcacagcaaaacaacgccgcctcatactgccagagttcttttggctgataaaacagataattgcagaaactctctttgtaatcctgaatgaaaatatgccgtttatcaatattcatccgtactgcgattccccgcaacatctgcgccagctcttccgtcagctccggaacactgaacacgatcccgttgatcttcggaaacgactgcagcgacagttcgataaatttagcaagcagccatactgcttcataggattcttctccaaattcaattttttcccctgccaggcttttatccagtaaccggtttacggtgaatccttctttcaagctggccagacgttttgcttcttttccgtatgcccaggtatcacgcagctttccgatgaccagagggatctgataattatccgcatctacttccatcgtctccggctctgccatttcttcattataaaaactgatctgacaggtcttttcattgatctcgtaacctataatattgccttgtcccataggagtcagcctccttaatactgttcaaacatatgcgcggcgattgcatcttcctgtgcatatgctttcatcttttcttctttttcactgccctctgaaagtaaaatatcattcagtcgtccatatcgcccggattctccaaacacagcatccttcatgcagcactctttatcacttcggtaagtgttgccatcaatggtctccttgaaataatatttcaaccgctcgttggagaacagcacaaatttcttcacatagagattctcatacatcggcgtaagcacctctgtagcataatctaccgcctctgaattttctttctgaagctgatagtagagcatgacacggcttcccttctgccctttgtactcgatcagcgtcttatcccaaagctgcagctcaatgagccattccttttcgtatgccagaaagaacgggaaataaatctgcttgccgcacagctcctgtaagaattttttcagagtcttacgcacagtcgtcgtatattctctggtggaataatattttaatacggcgatcttgcagatgtctatcgtttcttcacccttttcatattccttacagatgatatcaataatacttctgctcatcctgcgctcttccactacatattctctggacatatacgccagatatgcctgctgcagtctgaaataagctccctcttcataatattcttcaaagatcggaacctctccgaacaactcttccgagaacaacatctgtgtgatgatcctctccgccagcttctgagtatgtacttcatactctcttgcttctctccagagcagtttcatgtctgtagtcgctccgcagtagtaattcgcaagatacgtcaggatcactctgtcaaactgctttcttttaaacatctcaaaacacacgtaggtaaggaaatcatcacattcataattgttttcacggatcgtacggctgcacagtcccatgatctcttcttccccgtaattttcaatgccatactttcgcacagactcaagagaaagctcttctaccttctcctcctgacggttctgcttcagactgttcatataccgcttacagatatccatgtaacgaagctcatagaacaggcgcttgctttcatatggaatagaatctgtataatgtcttccatccttgctttcccacacaagccggtctgtctttgcatataaaaatacccttgctcctttgtccgtatacggcgccttctgcgtgatcgttccatcctctgcgatcacatgaataaatttcatattcggtacctttgttgtgatctcataagcatggcagatatcatacagtgctttgatctgctctgcttccatagaatcttctgtcagaaaacgcttgtatataatgcggagcatgggatcaatatttctgcgctccagctgattccacgcaaacgcttccatctcatctctgtaatgcgcataaatctcactggattcatcctcataagtaatcaggtttgaatacaaaagcgcccgtttatggaaatccagattatttccatgcataaagtaaagatacacggaacgcggcagtgctttattgactctgccaggctggatcgcagccatataaaactcgtacagctgtgcaatctttaattccgactccactgctttttcataccatttaaaaaagcagttttccatgcagcttcccttgatcagaagtgtacagattgcggtcaggatcatggactcttcatacatcccgtaggaaagcaccagagtctcataaagatagcggtcaaagcttttcagctgacttgccagattggctgtatataatgccagttcctttgtcatcagtttgtgcttggctgcaaaatacaacacccgcacttcaaaaatgcccagttttttcaaggaagaactcttctcacggaaacaccggaaggcttccagatagaaccagatactgcgcgtcttttcctcatagaagtgatgctccaaagctctgagacgttcactgatgatcttgtactcagaatctacattcaccagcatgcagaggatcttccagctgtcgggatgcttcatataggattttgaaagctcttctgccactctgcgtgtcccgatcgaatcattggaaagcagcgtggtcagatacaaataataggaactgatctctacattttttccgattgcaaaccggttgtaattgtaagattccagaatccattttgcctcttcaaaccgtttgcccaaaagacagatatgtgcatgtaccagaagatacatctcattgtcctcatccagactccgcaaatgctcgatcttctttaaggactcctcgcaccaggtgttcagatccagcttgccgctctcataaacaagacagcgctttaaaatacttgcaaactctttatcccgctcccgtctctcttcctctctgcagacatccttctccaccacgatctcataggtcagtatctcatacggggactccaggatgatctgcccgaagttgcttccctgatgaagctttgtataatcaatgatatattccagccggtacgcattaccgataaactcctccgtagtaaccttggtatgctccacacttaaaaattcgccttcggtacgtacatcaatggtcagatatccccacgtattcttcttgattgtaaaggtgtcttttctggattcccgaagagaaataaatgccctgctctcctcttccagcgtcagaaaaatcttctctttctgcttgcagcccaccaaaaactcttccaacgcctgctgatccagctcccattttctcatattgtcatacaatgcctgaatccgcttatcctcatacttcaggatctcataaaaatctctggaacggaacagtttttctgcctccgccggatcccgaaaagacagtttcttaaaatcttccagactctgtacttttccataagttgtcattacaaacggcttttcaataatggcagtaaatgccacctcatactctccgccattgcacacaatggtaaattttccgtgttccacatgtcccggaaccaggccggatccgtcatatgtataagagatgttcaccggattcccatcaaatccctgctcctcacagcgtacccgaaaagacgatggataaaccagtccacggatcgtcccctctccctgattctgaagagaaaagcttcctttgtacatctcgccttctccgacacgcatgatgatccgcgtctccggaaaaataatctccggctgtggaatatgaaaatctccttttgaaaggcgtttaattttattcttcaaatttgtcacctgctcattcttcttacgttgcatttttttgtaaacacactataataaagtattataacatcaacactgtatttcttgcaacggtggaatcaaagaatttaaaaggggattgtatacatgaatacaaaactggaatttcacggaagtgatattgaaaaagtgtgcgaacactacggattaaaaaaagaagatattgtcaattttggtgctaacgtaaatccgctcggactttccgaacaggtaaaaaaagctcttgcagctcatctggatctgctctcttcctacccggatcggagctataccagtcttagaaacatactctccacatactgtcagattcctgaagactttatcctgccgggcaatggttccagtgaactgatttccctgctgatcgaggaacgccgtccaaagcatactatgatccttggacccacttattccgaatactccagagaacttggattttcagacagcacgatcgactgcttttatctgaaaccggaacaggatttccaattgtctgtagagggactgtgtctggcgctggctaaaaagcagattgattttcttattttatgcaatccgaacaatccgacttcttccgcaatttttcatccggagctgataaagctgctggagttttgtcaggatcacaacatctttgtgatgatcgatgaaacgtacgtggagtttgcacctgatgtagatgccgtcaccgcagttcctttgacccaaaatttccagaacctgatggtactgcgtggtgtttccaaattttttgccgctcctggtatgcggttcgggtacggtatcaccggaaatgttgaatttctcaaaaaattgaaaagcaaacagattccatggtcattaaacagccttggcgcattcgccggcgaacttttgtttcaagacaaagagtatataaaaaagacacgcaatttgatactttccgagcgtgaatacatgtatacaaaattgcgtgaacttccttttttctatgtttatccggcttatgccaactttttgctggtacagatccaaaaagatggactgacttcatctgacgtatttgaagcctgtatccgggaaggactgatgatccgggactgttcttccttcaccggattagagggagaatttgtccgcttctgcatcatggatccagaagataatcgaagactactgacagtgtttcaaaaaatttcacaatcagcccgaaaacaagtatgatttatatacagagaacttccaccatgaaagaaagcaacattccatgtcaacaaaacatgaaatgttgctttttcttgtatatcaattcactctttccagtatttttctaaatattgatttgcatccgtatctgagagcttaaacttctccttcaatcgaagcaaaacatgttctttcgtttctcccatctcctgtagaattccaatacatgcaattatacaagtttctttcagcaaaagcaatgaacgaaatctaaaaatttgtcacagtcacttcattttctctttataaacataatctgttttttatctatggaaaacattttatcacattccactgcagctttttccaggcgtttaatccttgttttactttttttctgcattgtccatacaaacgatacatctgttctccatcgcggatatcacagcctttatagaacatagtgcgcatcatcgtatcatacatccagtttagatcggtctcttccagttccggaagagatttcttcaccgcttcttttccttgcattgaaaatggatcttccccggatggatgcagaaactctgcaacctcgtacaggctctgataaacaaaccgtacccttacatcgattgatcctgttcgacaccgttttcgtttccgcacagtccgtatccacgcctgcaatattatcagcgcgaacatcagaagtataacgccgatcaccttcaaacactgaaagatcgcctctcggatctgctgccacatatccgatgatgctcttgccctctccacattttccaacgcagaagctgcacctgtatgatcctcgaccttccagccggtatcctcctgccagacttcacaccaggcatggcccatgctgccctcaacttctgccacatattgcccattttcctgctgtgaaaatgcagataccggaatggcataaccttctgcaaatctggccggaatccccagcattcgatacatcaaagttgcagccgttgcaaaatgcacacaaaatcctctgtggttttcaaacaaaaagtactccgcaaaatcctcgccggacggtgtcgaccccggatttacatcatacacagcctgacgttttaatgtttcttccacgaaccgctctgcttcttcaaaagaatctgcttcctgcagttcgttgcacaatttgcgaaattgcttcaaagaagatggatactgcaaatatacacttgccggatccgtcgcacttccttcactccaggatcccccgtcatattcttttccatatttctccgaaacataaatcgtatctgtcggcatttcctcctgcgtcacagtgaacaacacacccttcctgggtacaaagctgcccagctcccgcaaatcttccataccgccggaagaatccatgcctgtctcttccggaatcatattctgctctgtctgcgggatctttgcctgtgttttttgttcctctttttctgactcttccttttgctcttccgttttcgtctgtgtttcttttcttgtctgcctgtctgcactccatgcattccacgtctcttctgctttctggattacatgctctttcacatatcgtctggtcgtccgatataccccatcttctttttctttcatcggctccatctgctctcccagctggaccgaacaaaatgccagaaatacgaagcttattcccgcaatgcagacattctgcagaacattacaagacatcgatgtaagcactgtcacatacaatccggctgcaatcatctgaaaccagcattctctcggatccgggaaatacgtcaaaaccgccgcatatatcactggtacaagatagaaaaccgcagaaatacaaagcaggagcttctttctttttaccagcattgtcccaagccagacactccctaaaaacccggtgatcaaaagtactgccatccacctctctgtctgatcctgaggtaatttctgcgtcaaattcactccggctgcagtctcccaccaggaccacagtgcaaaaccaacggtaagaaactgtaagatatgaactttccagctatgttgattcaaatccttcttttttcttttcataccccttctccccatatcacacctggataatcccggtatcattccatccctgaatcccctgtccgtccaggacaagaacactggaaaaattctgtgttcgaaacacttcttcaaacccgctttgctcttcctctcgtttcgctgcagggactgcttccatcagctcccagagcatttcataaaacgtctcctcatccttcacgcgccatcgcacaacacggacgtttttctgatcaaaccatgccacaacgtgcatacagtgttcttctaccagagtcctggaaagtgaagcacaaatctccatcatacgctccagctttttgaaatctttcgctgcattcgaaagccaaagtctgatacataccgcacatccaagaggatgactggattctttgaccatcatttttcccgccttggcactgatcttccagtggatcatctgcaccggatccggaatgtgatactcccggatctgatagatttccgtagcatcctgcccacccctttcattggaataggtttccggctcaaccggaaattcccgcgtccttctcccaatctctaccggcattgcacagatcttcggcaggactgtgaatcgctccttttcctgctgctttttacccacagataaaattccgataaaatcatagattctcacttctgtaatcgtcagcttccactctccgcacctgtctggttcaaatgtatagtctgcctgcttttcagaaagccataaactgtctttttgtctgatgccggatactgcatgttccatttccagcagaatcctgcactttccgatccaaagagaactttccttgcaaacctgtatactgactttcatttgctgttctttttctccgtaatccgagagtcgctttactctggcagaaagtcctctccccgcaaaaataagataaacgattcctgccgccggatacagaagcacaaaaatcaacagcccgctcagtgccggataaatatacatcaaaaacagatatcccactgcgccaagcaccagaagatatgttatcatccgttttcccatatacgctcctttttatcgctttttcaatgatggtgattctactgcggacaaaatttcctgcagtacttccttctgttttactttgctgatccttgcccttgtatttaacaggatccgatgctgtgcagtctcccgaaacactcccctgacatctgccggaaccacatattctcttcctgccagatacgcacccgctttcgccatctttgcaagtgccactgttcctcttggactcatccccagctccagcatctcatgttccctagtagcctgtgccagctgcaccagatattccagaatccgctcatgcataaaaatctgtgcagtctcccgctgtgcttcctcaagttcttcctttgtcatcacctgttgaacggcatctgacgtacggccattctcattttttcgcagaatctccatctcttcgcgaattgtcggatatcccatctttacacagaccataaaacgatccaactgagattccggaagcaactgcgtccctgcggagccggacggattttccgtagcgatcaccagaaacggcggagcaatctttccggtttttccatccacggtcacctgcccctcttccatcacttccaaaagggctgactgtgtcttcggagacgcccggttaatctcatctgccagaagcaggttgcagaccacggctcccggatgatatacaaacgcatttctctctttctggtagatggtaaatccggtcagatctgacggaagtacatccggtgtaaactgcaccctgcgcttctgcagtccgatcgctctggaaaaagcaatcgccatggtcgtcttgccaagtcccggaatatcctccaccagcacatgcccacccgccaaaaatgctttcatcaccgtctctgtcacttcctgttttccaatcactgccctctgtacttcctgcagtgcaaaaagtaccttctctcttactttttccacacctgtttcctcccctgtctgatatagaaaattataccatattttgcttttttcctcttacttttttcatatttttaacaaaaaagtaagaaacgttcctcctgatacatgctataatagagaaaacaacaaatgacaatcatgtacttcaagaaaggatggtctttatggaattcacagaaggattaagaaaagtatttttagcaggtgtaggtgctgtcgcctctactgcagaaaacgcaaaagaactgatcgatgatctggtagaaaaaggcgaactgaccgttgcacagggcagaatgctcaatgaagaactgaaacatacagcaaaagaaaaagtcaaagaacatatttctgtcaccgttaccaggaattatacagatgccatgaattctgtcgatcagatgaccgaagaggaattaaacgctctgaaagaaaagattgcccagacagaagaagcaagaaaagaacagcctgaagatccagatattacctccgatgaaaggacacccgaagaatcagaatgaataaagaacaaaaaacaatggatccttcccggtatccatcatacacggaagaagattcagccgcctccggcaggcggctgaacgagattttaaaagttttaaaaaaacaccagctgacctcgggtctgacaccggtcaagctccgcgagatcctggaagatctgggccctacttatgtcaagctggggcagatcatgtccatgcgttccgatatgctcccggaagtatactgtcaggaactgacaaggcttcgtaccgatgtgatccccatgccatatgagactgcagtctcaatcattgaatccgaattacagcgacctgtctctgacattttttcttccatcgaacagactccgcttggctctgcttccattgcacaggtacatcccgcacagctaaaagacggaacaaaggttgttttaaaggtacaacgaccggccatccaaaagacgatggaaaatgatatccggcttttaaaaaaagcttccggtattttaaaactgacactgggaactaaaaatctgatcgactttcatacgattttagatgaactctgggagactaccagagaagagattgactttgaaaaagaggccgccaatctagatctgttttacgccaaccaaaaagaaatcgcctatacgacctgccccgtggtatatcacgaactgacgactccaagacttcttgtcatggactatatcgacggaatccagatcgaccatatagcggaactaaaaagtcttggctacgacatgactgaaattggcgaaaaaacagcagaaaactactgtaaacagattttggaggatggatttttccatgcggatccgcatcctggaaatctctggatcagcaaggggcagattgcatggctggatctcggaatggcaggacatctgtcttccaacaccaagctgctgcttcgcaaagcgatcacagcacttcttgagaatgatatttattctctgaaaaacgtattactcgcgtttgccgaacctcaggagcgtgtcaaccatgcccgcctgtacacggatattgatgatattgtcagcaagtatgtttccatggacttcggcaccatgcggcttggcgatctgatcgaacggctcctgcagctggtcaaggatcaccggcttgcaattatcccggatgtcacactgcttgcgcgaagcatgatcacgatcgaaggaactttaagtgcatgtgctccggatgtaaatctgttgcggattttatctgtacatatgtccaatctgctgatccatgagctggatgcaaggcacattttaaaacataagggacgccaggtttatacttcactggacaaatccctcaacatccctgcccagctttctgatcttttgaacattacaaaaaacgggcaggcacaagtcaacctgcagctttctgatggcgagcatttccgccgtgatgtttattccattacaaaccgggtgcttttgacgattctttctgctgccctgtttatcggatcaggtcttgcctcggacatttacagcattccaaagtggtttggactcccttggatcagtttcctcggatacagtctgtccgcccttttattgctgattgttcttgtacagattttccgacggcgcaaataaaaaggagaagaaatccctcatttttttaggatttcttctcctttttcctacattctatttttctgaatcagtcgctgtctgctttacattcacaccctgatcttcaaagtctacttttttccattcttttttgtctaccttgatgtcagtctctttgcgccatgtttccacctgatcttcatactgtttctgcttgcgctcttctacgatttcctttttcttctgatctgttgcctcacgatccagcttgcttgtcagcttcgccacatagattccatcgtctgtctcaatcaggcttgtcacgtcccctacattttccagcgcatctgccgcctttaaaagatctgcgttcagtgtgctggactcagaatcaaatgtcgccgtctgcacttctttttctgccgaagctgctgctgcattcatgtccttgtccggatctgcgctgactgtatccagaaaggtctgtgccttttctttttctgccttcttttcatcgtcagtcatctgaacagactgtccggaatcatccttcttcgtataagagaactggacatactcgatcttcttttgtgctgcatcctcatctgaaacattttcatccacgccctctttcattggtgcatccatcttctgctgaatcgtagcaagttccagatattctttgacatattttttatatccggacacaacttctttgtcctccaatgtgttgtcttccacaaactcctctgcggctttgtcgatcttcttcttttcttcgtctgtcaactccactttatattcagaagcatgctgttttacaagatacatattttccagagactctaaaatactgtctttcatattctcctcatatgtcttgccttcttccacttcctggctccacattgtgtccgcactcatccccatcaggcctgcataaaacgactcatactgcgcctgctgcatacgcgcataaaaattagcaacaccatacgaaaccttctctgttccgaccgttactactgtagcatcattatcaggggcagcactgcatcctgttatcgtaaccgccgctaaaataccggcaactgcggtgatcacacctctttttttcaatccaaccataaattcctcctctaattgtacctaattatttcattataacgtcttttttctcctctaacaagctctttatatcatttaagagctttttcacaagttccagaaccgtttcatccttttcctttttatttctaccctttttataatagacaaaatacggcactgcctccgccttaaacaccagatttccccggtagctctgaatcaacggaggaattttctgcggattgaccttcgctttttcatacatggtaaaccggaattcttctcctttttgttccactgccgtcacataagctgaatgtgcaagcgctttaagacctgcgatctgaagaagctgctgtacctttcttggtacatccccgaaccggtcgataagctcctccagcatatcatccatctcttcctcatcttcaattcccgcgatccgcttgtaaatatccagcttctgatattcgttcggaatataggaattcgggatatacgcatccacattcagatccatcacggtcgtatagatttcctcctcggttccgccttttaactgttttaccgcttcattgagcatcttgcagtacagatcatatccgacagcctccatatgcccatgctgttctgcacccagaagatttcctgccccacgaatttccagatcccgcatcgcaattttaaatccggaaccaagatctgtaaactcccggattgccgccagtcttttttccgccacttcctttagcagcttgtctcttcggtacaggagaaatgcatacgccatccgattggatcttcccacacgcccccgcagctggtacatttgagaaagtcccagacgatctgcatcatggatgatcatcgtattggcattggaaatatccagtccggtctcaataatcgttgttgacaccagcacatcaatgtctccgttgatgaaatcatacatgatattttccagctcatgctccgccatctgcccgtgagcaaacgccactgtcgcgtccggaacaagtttctgcacatgatctgcaatttccgcaatatcacttacccggttatatacataatacacctgtccgtcccgatccagttctctttgaatagcttcacggaccatctcatcattgtactccatcacatatgtctggatcggcatccgatccatcggcgcctcttccagcacgctcatatcgcggattccaatcaaactcatatgcagcgtccgcgggatcggcgtggcagtcagcgtcagtacatccacattttcccgcagttttttaatcttctctttgtgtgtcacgccaaatcgctgctcttcatctatgatcaaaagtcccagatccttaaattccacatcctttgacaaaacacgatgcgtcccgatcagaatatccaccagtccttttttcagatcttctgttgtcttcttctgttgggcaggcgtccgaaaccggcagagcaaatccacgcgcaccggaaattctttcatcctctgcacaaacgtgttgtaatgctgctgtgccagaatcgttgtcggcaccagatataccacctgttttccgtcctggatcgccttaaatgcagcccgaatggcaatttccgtctttccgtatccgacgtctccgcagatcaggcggtccatgatctttttgctctccatgtcctgcttggtatcggcgatcgcctgcagctggtcatcggtctcctcaaacgggaacatttcttcaaattccttctgccagaccgtatccggttcatactgatatccattctcctgctgccttgccgcatacagctccaccagatccctggcaatctgtctgactgccccgcgcacctgattctttgttttcgtccactggttacttcccagcttgttcagctttggcttttttgcatctgctcctgcatacttctggatcagatccagctgcgttgcaagaatatacaggctgcttcctcccgcataagaaattttcatataatctttggtgatcttatctacttcaatcttttcaattccctgatagatacccagaccatgattttcatgtaccacataatctccaacctttaattcggagaaactttggattttctgtccttcatatagttttctgcgtttctttttcttctgtctgccaaaaatatctgtttcagagatcaccatgaatttcagcatcggatattcatatccctgtgtcacatgcccgtatgccaccataatttcccccggctgcacttcacgatccatatcttcgctgtagaagctgctcagatcataatccctcagatcttccgccaggcgctttgctcttgtcctggaaccagacagcaagatcacccggtactgatttcttttcagccgcttcaaatcccttgtgagcatctcaaaactgttgttatacggattgacacccttcgtctgaatataatctgtttcccggatctttaaccccctgcattttccttccagcgcggtaaatgccactccgtaaaactgattgatccggtttaagatttccagcaccggatatactgtaagctcctgcgtttcttccagcccggcctcttcccgcttgcggacgctctcctgaaattcctcttcaatctcatttgctttttcaatcagcctctgcggctcatccagaaacaggatcgactcttctgtcggaaaatactccagaaaagactgcttcttctgactctgcagttctgctgccggataaatctcaattttctgcaggttttcaatcgaacgctgactttctacgtcaaatgtccggatcgaatctacctcatcgccccagagctccacacgcaccggaatctcttctgtaagcggaaaaatatccaggatcccgccgcgcactgcaaactgtcccggtccttcaatctgtacttcccgcgcataccccaggccggaaagtctctcctgaagcttagtaaaatcaacagtatctccggatgagatctgaatccgcttcgaaacgatttcctctgccggagaaagcccgtccagaaaagcatccatagtcgtgatcactgtaatctcctgattcttttgtcttgtcaccatactgcggatcacttccatccgctgcttcatcagataatttcctttgatatccgcatggtaaaacaacaaatctcttgccggataatacaataccccggaatctaaaaagcgatattcttcatatgccttctgcgctttttcttcactggaaaaaacgatgatcttgtaagaaaaaccatcgccaagcgcatacatcaaatgtgttttttgtgaattgacacagcctgcgatctgcaaaatccccttttctttccttcgcttctgtaaaatctcctgatattctgcaagttccgcaagcggtgcgataaaagcctgcatcattttatttttccttctttttccgattatactcgttcattgcagcctcgatattgcctgtcacaatctccttcactgcacaaactgcatgttcatatccctcttccatctgttcctgttcttcttttgaaaaatgtcccagcacataatcagccagatcccatttcggcggtttttctcccacacctactttaatacggggaaatacctgtccacccaaatgggcaatgatatttttgatcccgttatgccctccggcacttcctttcgcccgaatccttatctgccccactcccaggctgatatcgtcataaatgacaagaagctcctgctcttcatccactttataatagtccagaagacttctgacgctttccccgctcagattcatataagtctgaggttttgccaggattaccttctgcccctcaatcattccttttccgatataagctctgtgttttttcgtatctacatcaatattatattttcgtgccagtgcatctattacttcaaatccgacattgtgtctcgttccctcatattctggtgtcggatttccaagtcctacaatgataaacatagttgtccacctcttctttttccaatctgtccttttaaactgcgttacctattttacaggattccccggcttttgtcacgcaaaagacgggaatattttccggatatgcctcataaaatgataaaaaacaagggggattattcttatggattccaaaacaaaaatcgttgtccttcacacaaaggagctcatctatactgctgtgttcgcgctcctttgtattcttctgatcgtgctgcttttcgtcatgtttggtcccggacatacagacaaaaagcaaacatctcacaaacagtatacacctggtacttacacatccaccctcacactgaacaacacaaatctggaagtggaagtatctgtggacagctccaggatcaattccatccggtttgccaacctggatgaaaccgtgactacaatgtttcctctgatccagcctgcgatcgaagaaattgccgaccagatttatgacactcagtcactggacgccgtggaattgtccgatgacgcgccttatacttctcagatcattctaaatgccatccggcaggccgtagaaaaagccgcagtcaacaaaactgcggcttcctgcatatctttgattgtcttttacccttccacgatcagatagcgtccacctgaaagcgggaatacttcagatgcctcttcgagttcttccgcatccatattctccacgtctgcaccgctctcctcaaaatattctcttacttcatccagagaatctactacgaccgccatacagtcttccagaaaagcctctgcctcttccattgtctctgccaccggctcgtcaaaaagctgcgattgttttttcagaaacgtaagcagacattcctcatcgtattcattcatgctccgttacctcccttttttctcttcccatgcggatatcagttccagaagctcctgtgccgtatccacgatatacgctgcgttcgcttcctttaagacctctctgcttcgaaatccccaggaaacgcctatcgtgcgcatcccggctgcatgtccggtcctgatatctacttcggagtctccgatatagatggtctcttcaggagtcgctcccatctcccctgcaatctgaaggactgctgtcggatccggctttctcggcacgccttctttctgtccctgcactttaaaaaagagatcttttccaaatacagtttccacaacatgaaccgcctgtctgtccggtttattggaaagaacagcgcatctgattccctgctcttttaatgtacccagaagctgcacgattccttcgtagggagccacatgatacatacaattctcattgaagactctcccatatatttccatcgcttcctccagcctctctaaagcttcttctgacgcggcacgcagtgctttttccagaagaactctgcttccgtttcccacaaacatccggcactgatctcttgtaatctctggcagtcccatctctttcatggtcagattcacagaaaatgtaagagagtccagcgtatcggtcagtgttccatccaagtcaaaaatacagctcttatacatcatcgtctccatctcctccatctattctacgtgcttatcatagtatgaagttctggaaatttcaaccgtaaaatcatttttatgcagttttctctgaaattttgttactggaaagaataacagcctttagcccaacagatattgtttcattattttcaatgcatttttttccagccggctcacctgcgcctgcgaaatctgaatctgttctgccacctccatctgtgtctttccttcaaaaaatcgaagctggatgataaaacgttcccgttcattgaggcgttccatcgctgcctccagcgacagctcttctacccagttttcttcccggttctttttatcactcacctgatccatgatatacagcgtatcgcctccgtcgctgtataccggttcatgaagactgaccggcatctggattgcatccagtgcaaacacgatatcttccttggatatcccgatctcctcagcaatttcctgcaccgtaggctctttggaatatttcttcacaaatccttctttggcgtagattgctttatatgccgtatcacgcagagaacggctcacacggatagaattattgtcccgcagatatcgtctgatctcaccgatgatcatcggaactgcatacgtcgaaaactttaccagccttgaggggtcaaaatgatcgactgctttcatcagtcccacacagccgatctgaaacagatcatcggcattttcactgctggatgaaaaccgtttgatcacactgagtaccagtcttaaattacccttgatatactgttctcttgcgtcttcgtccccctccttgatccttgcaagaagctcttccttttcctcttctttcaaaagcgggagcttcgctgtgtttaccccgcataattccactttatttcctgccatttgtgaatcctcctgtcctgtttctagttaaaagaattcaccatctgcaggcagtctatgcggttttacggaaaataaaaaaagttttactccttgacaagctacgtatccctctatgacctcttcttcattttatttcttttctgactctttttcctgctttttgtttctgattgcccgccgaatggcaaaaatgccaaatactgcgattgctcctactgccacaccgatcaaactgcagaaaatcataaaaaacacatatgccgtcatacctttgcctccttctaattatttagtctctcatttgacaaatcaaagtcttaaatctgacagtcccatacaaagaaaaagcaatgtgcatttctaaatttcaaaaagaactttctttttataaattttgttcctgttcaattcttgccgcctctgctttccaatattccataatatttctaaccattttgatacattcttcctttgcagtcttctcatcataaatctggaaatcactaaatgtatgaccacatggtaccagactccctttcatatcttttgcctcctatcttcattgtaccatttcacgtattcagagtcattaacaagcctcattttttctcacaaaaaaccacggatgagatttctcccatccgtgatcttctctttctcactattcccaacgatcccatttatcagcaagattattgatctgactttcaaattttgctttgtctttattcggaattccctctcgtctgtaaataacatccaaaagtcttcttcctgctgcgataagacgctcaaatgcagcgtctgctttcttctgggatggcttcttgcctttcacggcaatccgcacaccttcgtttaagatctcattcgcagccagatcgacttccccgttcgggaatggcgcccacgccggacatccaagcgtctcttctactttctgcgcaaattcttccgtcacagtgtcttcgccatgcaccacaaatacatgctgaagcggtgtcttaaatcctttcagccatgctatcagaccattcatatctgcatgaccactgattccgtgaagactttcaattctggcatgaacctcgatcggctctccaaacagcttgatattcttctcaccttccagaagccgccttcctaatgtcccgttcgcctgatatcccacaaacagaattgtacattcttttctccacaaattgtgtttcaaatgatgacggatccgtcctgcgtcacacatacccgatgcagaaataattactttcggcttttcgataaaattaatcagtttcgaatcatcacttgtaacggatgtcttcaaccccggaaataccagaggattgatcccctcatccaccagtttgattgcttcttcatcgaagcattcccgcatattttttgtaaacactttggtcgcttcaattgccagtggactgtccagatatacctcaaaatcagaatattccggcaaaagtccatgttctttgatctcccggatgaaatacagcatctcctgcgtacgtcccactgcaaatgacgggatcacgacattaccgcctgcatcaaaagtttctttcaaaattctcgtaaattcagaaacataatctatcttctccgaagaatgtacccggtttccataggtggattccactaccacataatctgcggtatccgtacaccttggatctttgatgatcggctgatccacattccccacatctcctgaaaatacgatcttcctgctaatctcaccttcggtaatccagacctcaatacttgccgaaccaagcaaatggccgacatctgtaaaccggatttccaccccatcgcaaatatgaagccgttctccatatccacatggaacgaaaagattgatcgcagcctctgcatctgccatcacgtaaagcggctcaaactccgacactccggcacgtcttcctttccggttgcgccattcagcttcaaattcctgaatatgcgcgctgtcacgaagcataatgttacataaatccgctgtggcaaatgtggtcaatatctgccctttaaatccattcttgcacaaaaggggcaaaagacctgaatgatcgatgtgtgcatgtgtcaaaaatacatagtccacttctcccgctgcaatgggaagtcccgggttttcatacaggtccggtccctgctccataccacagtcaattaaaatatttttccccgctgcctgcagcaaatgacaacttccggtcacctcatgggctgctcctataaatgtaagtttcatatagcttcaccacccttttttctcattataacaccttttttacggagtgaaagcactttttgaggattcttctaatttactcataacgcacgatttcccgcttcaatctctgcatgatcttcttctccagacgggaaatgtatgactgtgaaattcccagtaaatctgctacttctttctgagttttttcgattccatcgggattatccagaccaaaacgcatcttaacaatgagcttttcccgactggataactggttgatggcacgcaccagaagctttctctccgcttccgtttccagatcccgatagatggtatcctcctctgttccgaggatatcagacaacagcagttcgttgccgtcccaatccacgtttaaaggctcgtcaatggaaacttccattttagtcttactgtttcttcgcagatacatcagtatttcattttcaatacagcgggatgcataggtggcaagcttgatctttttggttggattgaatgtgttgatcgctttgatcagaccgattgttccgattgaaatcagatcctctactcccactccggtattatcaaatttttttgctatgtacacgaccagacgcagattgtgctcaattaacatttttttcgcttcctgatcatattctgatccgagtcttctgatcacctctgtttcccgttctgtctccaatggaggcggcagcacttcagaacctccgatgtaatgaacctctttctgatttggaaacagcagccctttcagactgggtactacttttaatttaaactgctgcggcattgctacttttacaaccattttctcttcctcctaatatttcagggttgatgatcatttgatacatcccctgttctgatatctgttcttcacatattccgaccagtggatgataaatccactgttttttctgtacaatatacattttctctaattcaaataccggcatgacaccgctttttcctactgtccgatatggaatcagacgaaaccctttcaagttttccttctccccggtcagcttttctattgtgctttgttctaaaatacataccggcttttcactcaatggatctttcaacacatttccggtatcccaaagcccgcgtatctcacagcagcttccttcctgatacaagatgatccggcagagcttaagttcctccttctgaagccggcacaaaaactcccagaccgcgcggattgtgtaatagcagccaatcacaacagcaaaatagagacttgtgtatttcacatagggttttaacattcccagaatcccgccgatcaaaacggaaacaaaatacaataaaatataacacttcaaaaattccgaaaagctgcgaattttaagaccgcataccaccatcccgctgctgacaagcatatgaagcactgccattgtgattcccacgggcagccgcaaaattaccaccaggcaggaaagccctgatccgaccagaccgcctgcaatcactcttttcatactgcccggcattttcatcaaggcttttacagaaaacaggataaggacgtccatcataaaattcaccaaaaacatgacatctatgtatacttcatagtacatgttccaccctctttctcgttggtactaaatcgatttggcactcaaacaagatttattataatcagaatcattttgaaaatttgtcagaaactgacagagaaacagactttatttcgacaacaatcgtgtgaaaaggaaaaaaggacaggtctcttgtcgaaacctgtcccaaactgactttattattttttaaagaaatccggaatcttaatggactgctcttttactgtgcttgaaggcactcttccctgtccctgaagggtcgggattgtggaatttcctgttgttgttcttcctgcaccgtactctgctgccggtgttcttgcaaacttgtccgcatttggaagaatagatcccatcttctgctgtccttccagtcttgcttttaacttggatgcacttccacccacattgtgaagtcctgttgcaataactgtaattgtagcttcatcagatcttgtatcatcatacatcgcaccgaagataatatttgcattctctcctgcaagttcctgtacataatcagcagcatcagatgcatccatcagagtgatatcaccggaaatattaatgataacgtgtgatgctccctgaatcgttgtctcaagcagcggactggcaacagcctgttttactgcctccagagccttgtcatcaccgcgtccctcaccgataccgatgtgtgcgattcccttatccttcataactgtctgaatatctgcaaagtcaaggttaatcagagaaggtacgttgatcaggtctgtgataccctgaataccctgctggagaacctcatccgctttcttcaatgcttccggcattgtcgttctgcgatctactacttctagaagtttatcattcggaatcacgatcatcgtgtctacattctcttttaatttatcaataccagccagtgcattcgccattcttgtacgtgattcaaaacggaacggctttgtcacaactgcaactgtcagtgcgccctgctcttttgcgatacgtgcgactacaggagctgctcctgttccggttccaccacccataccacaggtgacaaataccatgtcagcgcctttgagtgctgcggaaatctcttctgcactctcctctgctgctttctcacctacttcaggctgtgctcccgcaccaagtccttttgtaagcttctcgccaatctgcatcaatgttggtgctttgcataactgcagtgcctgtttatctgtattcactgctataaattctacacctgcaatctgctcatcgatcatacggtttaccgcgttgttaccgcctccgccgactccgacaacaataattcttgcagctgcttctgattcgtttgtcttaatctctaacaagggtagttcctccttcgtcgtcctatcaacttattttatacatcccatcataaatatgtatgaacaatagaattcaataagtatataatatagtctttcacgcaaataatcaatagatttttgtgtattttatgttttttttattcagttgtttctccttcaccggttcctgctgcagatgtctgatccgtctgtgcagcttcagattctcctgactgattttcgtccgtctgtccggcgtcctggccctcatctgcttctgtttccgctgctttctccggtacaaaacgcacggaagtaccggacgtttcataattctccaggtgcagtacacctgcctgccccgcaaacttttcattaagcttctcaaggatcggcgaaatctgtgcgatcttcatctcatagtttccttttcccagctgcactgtgaccactccgaaaatcagattgactcctccgtcactgcaggtaagccggtcggaagaaagttcatatttgttggaaagtcttgtcacctccacgatacgttcaaaaatatcctgatctgtgaccgggagttttttgttcattttcacttttttggtattaagctccaatccctcgataaacggcgccccgggaatcacttccgttgtctttaacgcagctgttccgtcctcatcaaaatacaaaaactctccctggtaatcaaaataaccaagaaactccttctcttttaccttcatcacgaccgtccatgggtttttaattgaaactttcacggattcgatcgctgccggctttgtcacatctccataattatacttccaccagatatagatggagttgaatgcatacttgtctttttgaacccattttaccagttcttcgtcctgacagtactggtttccggtcacctcgatcttccttgtctgaaacagaagaaataccgcaaaaaataacacaagtaccgacaggactgtaatcagtgccgccattcgaatcttctttttcttttgtttcataaggcttcctccttttctttctctgcttattctaccaaattagacacacttaacacaagccccatttccaacagcagaaataccaccgaagttcccccatagctgataaaggggagcgtgatcccggtattgggaatactgttcgtcacaaccgcaatattcaagatcacctgaatcatcatatgcgccatcgctcctgttgcgatcaaggcaccggtcagatccttcgcatgtgttgcgatcacaaaaaagcgccagatcagaatcagaaacagtaaaatgatcaggcttgctccgaccagtcccagttcttcacagatgatagaaaaaatcatatcattctgggcttccggcagaaatcccaacttctgtacgctttttccaagccctcttccaaacagccctccggaaccgatggcataaagtccctgcagtgtctggtaccctttttcatacttttccggatttctccagattgcaagtctctccagacgataactttccagtgccagaaatatccccataaaccctgccgctgccgcacccattccaagaaactgggcatacttcggacttgccacaaaaacaagtgctgccgcaattcccaggataataatggccgtacttagattacttgcacctaccaggcctaccacaggaagaactggcagcataactttgacaagtgttgtaaatttttccatctttcttgcctggtttgagattacgcaggacaaatataaaatgactgccactttcgcaaactcagacggctgaaaagaaatgggtcccaaagaaagccatcttttggacccattgtactcatctcctataaacatgactgctacagacagaacgattgcagtgacatatcctagctttgcaaaaggaatccacctgtgatagtcgatccctgccacaataaacatgcctgccagtcccaacgctgtcgcaaatccctgctttttcaaatagtaaaaagaatcatggaactttacccggccattataggcgctggtactgtatagcagtatcagaccgatcccgaccaggagcaataccaccacaagcagagtataatcataccgctgcttttttgccggatgcttcaacgcagatccactccttataattgatttacaagttctttgaatttatctccgcgttcttcataatttttaaacattccccagcttgcacacgccggagacaaaagaactgcatctccgggttctgcctgttctacacagatattgactgcctcttcaaacgtatctgccagaatcgtatctgtaaatcccagcctttttgctgtctcattgatcttctcttttgttgctccgagaagcaccagtttttttaccttaccgtcaaaagactgaatccactcatcataagaagaatccttgtcatatcctccgccgatcaaaaatgtaggtctgttcattgcctggattcctttgatcgcagcatccggatttgtgcctttggagtcgttgtaatatgcaaccccgttcttttctgccacaaactcgatccgatgttccactgccgtaaattcccgaatggtcttacggatgatctccatcggaacgtgatacgctgccgccatagccacagctgccattacattttcataattatgcattccaagcagttttaattcatccacatgacagactttctccggattttctctgcaatagacgatattgccatcttccagataaattcctttttccagtctgcggcgactggaaaaataaatcacctgcgctttgactctttccccgaattttctagtcacatcatcctcataattcaaaacacagacatcttcttctgtctggttttttgcaatctgctctttggcttcgatataagcttccatcgtgtgatgacggttcagatgatccggtgtgatattcaaaatcgcactgactttcggacagaatgtgtgaatcgtctcaagctgaaaactgctcatctctgccacaataacagaatcatcctttgtctcccgcacaacgctcgtgtaaggattgccgatattgcctacaacaaatgtgctttcccggaaatttttcatgattgcaccaagcagtgctgtcgttgtcgtctttccgtttgttccggtgatcgccagcacatcccctttaccaaggacatatgccagttcaatttcaccccagatcggaatccctgcatcccgcatctgattcaccgatggtaaatctgtcggaacacccggactcatcacaaccagagaaagctctgaaagaagcgcctcgggaaatgctccgagaacaacgcttacgtttccctttgcctgtccttcgatctgctctttgattcctgccgcatccagactgtcattcccatcatacaatataacttctgcaccttcctgcagtagcagagccgcagcagaaacaccactgataccggaaccaaacaccagtacttttttgtctttaaacttcatgtctatacccccattaatgcgatcagacagagcagtgcagtcacaattgaaaatactgccacaactcttgtctctgaccagccgcacaattcaaaatgatgatggatcggtgccattttaaagaaacgctttccaccggtcttcttaaaatatgtaacctggatcatcaccgatgccacttccaccagatagatcagccctacaatcatgataaacaacggcatctgcatcatatacgccgttcctgccacgaaaccgcccagtgcaagagaaccggtgtctcccataaacacactcgcaggatatacattaaacaataaaaatccaaggagcgcacctacaaccgcacaggtgatcggctctactccgctctttgttccaatagcaaccaccgtaaagaacgtagctaccagaaccgtcacgctggatgccagtccgtccagtccgtctgtaaaattcgttccgtttacagtaccgatcactgcaataaataaaagcggaactgccagccagccgatatcccagtattttccaccggaaaacggaatcagcatagacatcggaatgtctgccactttaaacacgtaatatgcaaaaattgctgtcaccaccagctgcagtgccatcttctgtttcggatacagaccgtctgaacgtttcatcacaaccttcagataatcatccagaaatccgatcagaccaaaaccaagcgtcagaaacaggatcggaatcactttcggataatcttttacataaaacagggacgtgataacgacactggccagaataataattcctcccatggtcggcgttcctgccttcttcaaatgagactgtactccctcttcccgttctgtctgtcccattttcagttttctaaggaatggtattacgatcggtccgagcaccaggctcaaagcaaacgataccaataccggtattactacatgataactcatacttccacctcttcatctcttttgtttcaatatctcaattagtataccgcattacctactgtttttcaatcccgagatatggaaggacattgtcaaaaatactgcgaaggaccggtgcggcgatcgttcctccataataaatcccctgcggattatggatcaccaccattcccagtacctgcggatcctctgccggtgcaaatccgataaaggaagaaatgtacttattcgcacttcgcggcagtgtctgagaggtggctgtctttccgccgatggaatatccttcgatatatgcatttttcccggacccattggcaacaactccctccaaaagtgtctgcatcgttttcgatgttttctctgataccacacctgatctttcttcataggacaatgtttccagcacatttccttccctgtcaagaacggcttttccgaaatgcggggtaactcttcgccctccattgataatggaactgactgtcactgccatctgaaccggcgtaacttgaaatgactgtccaaaactgatggtggcaagctccaccagaccgatattttccacctcatgcataatggttcccgcctctcccggcagatcgatccccgtcagatccagaagtccgaattgctgaaaatagtcataaaaccgctctgctccgagacgcagaccaatatcgataaacaccgggttgcaggaattctgaattccctgaacaaaggtttcactgccatgtccgcccactttgtgacaccggattcttctgtcttctaccatgcggtatcccggacaggaaaaggtatcctcaggtgtcacgactccctcttccaggcaggctgcagacgtaatgatcttaaatgtggatcccggctcatacgtatcattgatacatcgatttctccacattgcatttaacgcatcctgcaatttttctccttccggttcttctcctgtattcaattcaaacggatcattgagattaaattccggcacattgaccatagacagaatttctccgttttgcggattcatcagtaaaatcgacactccgtccgcctgtttttcccgcatgactttttcagccgcctgctcacaatatttttgaatattataatccatactgatctccagcgttttgccggccacaggctcgatccggccttccgcgaccgcatccagttcgattcctcttgcatccgttgtcgtgagaatggttccgttgctgccttttaatgtctcttcatatttcacttccagaccaatgatcccctgattgtctcctcctgtgaatccaagcaccttggatgccaggctgtcatacggataatatcgcttatagtcttcatccaccttgactccatccagattatactcccggatcttatctcccacttctttttccacgttggtttttactttttccatggaagagaccttctccactcgctttctcacctctgcctgatccatttcaagctcttttgcgagaatttccgtcacccgttccggttccttgatctgactgtggatcacagaaatcgtacacactgttttgtttgtagcaagcacaacgccatttcgatccacgatttctcctctggctgccttgatcttacgttcccgtttatgcagatcctcggctcgtttctgataatactcggcatcaaacaccatcagatagaccagtcgcccgatcaaacctgtcaaaatcagaaacgcgcaggtaaacactaccagaattttctttttatgatacgttttatttttcataaaaaaaccttacagaagactttatacaacatattttctcttctgtaaggttattcctgttttattctattgtttccgatgattccggagatgttgcccagctatcataatccggctggtagttcggatcgatataggtgccatcctgattactgtaggtatcttcgaagttctcatcgaaatcctgctgtacgtcttctcttacaccgctgtcctctggcagtgcatccccgtttcttgtaatgttcagatatggaaatgcttccgccatgatcttctgtgacagctccagaacatacgaacttaattcctgattttccacatttggctcatcgatgaccacatagatcacaacttccggattttcctgtggtgcatatccaataaaagaaagcagatagtctccattccctcgcggaagcttctccgctgttccggtttttccgccaatgtcgtatccctctacatttgccggaactccggttccgtctgtcattaccgcgcgaagcgcttctttgacacggtcagaagtctgttttgataccgtttttcgaagcaaagtcggatcgtttgtttcaatcacgtttccgttttcatcctgaatctgcttcaccacatgaggctgataataatacccgccattaatcagagaagaaaatgccgacaccatctgtgtcatcgttacattgaaactctgcccaaaggaagacgttgcaagatctgtctctcccatattctctgcagtaaagatcagattttctgtggacgcctctcccggcaggtcaattcctgtgtactctccaaatccaaagatatgctgataccggataaaatcttccactccgatcttatcggccatagccatcagagccacattgcaggaattggcgattgcctgatctacattctctgtcccatgccctgacgtattgtgacattgaatataccagtcacctttccatgtaccaccctggcatacataggtttcctgaccggtcaaagctccggtctccagacctgtggccagagtaaacggcttggctgtcgatcccggttcaaaggcatcactgacgcagaaatttctccagagattgttcattgcattcagcttatcatcatctgacatttttgccaacgcttccgtcgtataccacggcgtcagatctcttggattattcagatcaaagttcgggtacgaagcctctgcaagaatctctccgctgttcggatccattatgatcacagccgtattcttacttcccagctcatcctcccgttcttctcctttgtgtgcctcattaaattccagaatatatttttctacaatgctctgcagtgtaacgtcgatcgtggacactaccgtatttccattctttgccgctttcacagtacgttctactgaagaagcactgtcaaaatatccatattctcttccgtctgtaccgttaagaatatcattgtatgcactttcaatgccgattgctccctgatttccggatacggaaaatccgatcacatcacttgcaagactgttgtaagggtatgtacgctggtaatcatcctccagccagaccccctgaacattcggatattttttatcatcctcgtcaatttcctggaatttcttggcatcttcataagaaacgcctttttttaaaacctcgtaacggctgtccggatttgccttgatcgtatcccttacttcttcactgtcaataccaaagcattcttctaaaacgtccagtgtggaatcgatatacttatcgctctctccctcgtctgtcacaaccaccacatccaggatcacattatacacacgctcactggtcgctacttttgttccgttccggtctacgatatctcctcgtttatacggaatggtcctgcttccatactgctgttggttcagaacgatcctggtatactttccacctttgaatacattgatatacgtaattcttccgataagaacaacaaaagccagtataattgccacaaacagcattaccagcttcttttgcatccttttcggaaatttctttgttaaaaattgaaatggattttttcttcgtcttcttgtcattacatcttcctattttgacacgtcctttgactttgcaagaatcccgtcagatggtatctcattatactgcttcacgtaatcactggtcgggctgtcatactccaccacattaccattcgccgcatataccatgccaagttcattcattgctttgtcccggatttcctgcagattcacagaatctactgccgcattgtatgccgtatcattcgcctctgtcagatctgacaactcttcctgaagagccgtgatattttctgacctctgcacgagttctgactggagctgcagatatacgacacagatgaaaaccgcacaaacagccgccactgtcaaaaaccctgtatagatcgggctcatatccaatgcacgcctgcggttctttttcacctgactgcttgtccgttttttaggacgtacttccactgcttgtttctcctgatttggcaataccttcggctgatgcgctacatttccatagacgtagaactgtccagatctgtttcctgtattagattgtcttctgtatgtagttctctttcctgcagccatttggtctgcccctttccacgtacaatctgccgggctctccccttcccggcagattttattttttcagatactcaccctcatttttttcagcttcgttcgaaaatgcgaagtttggcactttttgaacggctgttatacatcaactcttcctcagaaggaagaattggtttccttgtgatcacttttcctttcgatatgtttccacatacacaaaccggaaagtgacttggacaggtacacggattttcattctttcggaatgcactctttacaatccgatcttccagagaatgaaacgtgataatacagatccgacctcccggattcagcatatcgatcatatcatccagagtctcccgaagtacatccaactctctgttcagctcgatccggattgcctgaaatgtccttttggacggatgtccggatgttttctgaaacttcatcggaatggctcttctgataacttcatttaactgtcctgttgtctcaattggatgctttccgcgctccatcacaatgtgttttgcaatattctttgcaaatttatcttctccataatcacggatgacacggtaaagttccgcttcgctatagtcattgacaatgtcttttgctgtcgtagtctgtctctgatccatccgcatgtcaagcggcgcatctgtgcggtaagagaaaccgcgctccgccgtatctaactgatatgaagacactcccagatcgattacaatcccgtctaccttgtcaattcctatttcatggagcctcggtttcatatcacaataattgctccggattattgttactttctccccgaaaccggataatctggcgcccgccgcttcaatcgcgtcggcgtcctggtctattcctataaatctccccttgtcacttaagcggcttgcgacttcatatgcatgtcctcccccgccaagtgtcgcgtctacatagatgccatccggcttcaccttcagaccatctactgtctcttcaagtaaaactgatgtgtgtttaaatgccatagaatcctccattcactctctgtccagaatcaaattcggataccgatcgcctccatacgttctgcaatcgcatccagatcttcttcactgaccatactgcgctcttcccaaagtgctttatcccagatctccacgcggtcctgaactcccaccaggacaacgtccttctccagatgtgcagcttttcgaagtgatgcaggtacagaaactctcccctgcttgtcaaagctgccttcagaagcacttccaaaaaaataacgcttgaaaattctggcatccttgttcatccgtggtaaggtatttaattcagcaacaaactgattccattcgtcttgagaatacacaaaaagacacccttccaagccattacagatcacaaagctttctcccaagtcatctcgtaatttggctggaatgatgagtcggcctttttcatcaatactatgattaaactctcctaataacatctggaatcccttctaaaagcaggactccactttcgccccactttatgccactattcaccacttcctaccacttgaaaccattgtaaaccaccacgccccctttttcaacccttttttcacatttttcacatctatgtcacaattctgtaaaaatttggttaaaaaaagaacaggcttccaaaacctgttctcatatcattctttattcttttattcgccaagtccgctcagataattattcaccgcatcataattcacttctgccacttcccgttcctgctttgactcatgagacacatatgcggaatatccgagccatcccaccaatgccaatgcagccagtgacagtacacactttctgacaatgttcataatgcgctgctttttcatgttcttcttccgattcgccttttcctgtttatagcggtctactttttcctgactcatatctaaaagctcctttgtcccctatgtatttgacagcttctgtcctgcactctttctacatagtgtaccacatccgactctaaactacaacaataattcctccgtcattggcataaaccgtactgatcccggatgtatctacgataaaactggacttcactgcaaaccgttcttttaaaaggcgctgcacttcttttgctctctcctcacagttacagtgtgcaatagccagaatcttatctcctgcattgaccacatctgctgccacgcagtccgccatcttcacaagtgcttttttcatgcctctcgctttttccttctgacagatcgttccctgcggagtagatcccatgatcggtttgatattcaaggctcccgctaccagtgatttgattcccgtaagtcttccgttctttcttaaagtatccagattctccagtacaaaataagtgtgctgctcctcaatataacactctacactttccacaacttcttcgaacgtcatcccggccttttcacactgctgaaccttcaatgcgatcaaagtctctcctactgaagcggagcgtgaattaaatacatgaatctgtttttccccatattcttcttcatacagattttttccaagaaccgcactgttatatgatccgctcaattctgccgatagtgtcaccacataaatacgttcggcatcgcagtgataactttccatatatctttccggagacggacaggatgtcttcgcacaggatgtactttctgcaatctttaaaagcagctcttcctgcttcaagctgtcatcatctgtccactgagtgtcttctatctgaattccgagagcaacgtgttcaaatcctccgtctgctttcatctccggcgtaaattctccgcaactgtcaacaattactttatagctcatgtctttcctcccaaaccacactttctttttccaccatctattatatgtggttttcaatactacgttacttaatataccacactttgtgtcggatgaaaagacatttttatatcttttgcttttcctattctgtctgaagcttaattctccgggatacactcagggcaagtcccatctccgtcatcaggaacagaaccgaagttcctccataactgacaaacggaagcgtaacacccgttgtcgggatcatgttcgttacaaccatgatatttaagatcacctgcagcgcgatatgtgcaaaaattccggtcacgatcagtgagccgtacagatccggtgcatttcttgcaataaacatcaatctatatagaagaagtccgaacaggatcaatactacgattgctccgaaaacgccaagttcttcgcagataacgctcagaatcatatcattctgcgcttcggggatcataccaagcttctgcgtgctgtttccaagaccttttccgaagaatcccccggatccgatcgcatacagtccctgaagcacctggaagccggtgccatccgagtgcccttccggatccagccatgttgtgattcttccgattcggaaattatcactgttcgtcgcataaaccgcaagtatggccactatcacgatcaaaattcctgctccgatggcagcgatcatcaaaaacggctttgtcttcggatgtgccacaaaaatcaagacacaggtaatcgccattacgatcacggcagtacttaagttgtctgtaagaataaacactccacctgctgccaccccgccatagatcagaagtctccggattccaagccagtcattgacttttcttcccatcttacagatctcacaggaaataaacaaaataatcgcgatctttgtaatctcagatggctgcaatgtcatatttcccggaagctggatccatcgtctggctccattgatcgttgttccaagaggcgtctgcaccagcgccatcataatcatggcaaacacatagatttcaaaagaaaaagctccataaacatgataatcaatcctggaaacgatcaacataactccaaaactgcccgcactgatcattgcctgtttgataaaataggacatgtcatcctgaaaatccgcctgagcgctgtacgcactggcactatagagcataatcagtccaaagcaagtcaaaaatataatgaccagcatcagattataatcaaaatacgtggtcggcacactgctttgcgcaatctctcttttctcccgtttctgtctggcagaacgtctgcttttcgtttccccctgctctcttctgcgaatcggctgtaccgttttgctgctcataacatctcccctgtttttattttactcggttatcttgcgctcattgccggatgcaccggttttccatgttcaaaaaaccggtcataccatacaaggaaaatgtagacagtccagatcttccgactgttatctgtcttttcatttgcatgttttgcatgcttgtgttcatccagcattttcacaagaagctctgtatcaaagaatttttttgccgcatcggaaagaaacatttcttttacccgattgtaatacgcatcttctttgagccatacccggatcggaatcgggaatcccagtttcttcttctctgcagtcttactgcggatcaccttttctgccgccccgcgaagtgccacttttgtcttcggtgctctcactttataatgcaacggcagtgtctgggcaagctccagtacttttttatctaaaaacgggacacgcacttccagagaattggccattcccatcttgtcccccttcatcagaatatcatgtaccagccagagatgcatatccacatactgcatcttagtcacagaatccttatctttcacgcgctcatacagtggtgcagtcaccttctgaattcccggcttgcagccttttttcaaaatacggttcgcttctctctctgtaaaaatattcgtcgcattggcaaaataacgttcttccagagtttttccgtgacgcatcaggaagcctcttcctttcatacctcttggaaggcatctctctgcaaaatttccaagcattcgtctgatcggcattggaattttattaaacgaagtatgctccagaggctcacagtaaatattatatcctccgaacaattcatccgatccctctccggacagcactacctttaccttcttcgctgcttcctgactcagaaaataaagtgcgatcgccgcaggatctgccaccggttcatccatataatactggatatcggacagattgtcccagtattcctgtggagtgatgacttttgcatcatttttcatgttgatgcttgctgcaaactctttcgcatcctgaatctcgctgtattttccttcgtcgaatccaacggtaaaggtacgatccacctgacctaaatatgtcagataactggaatccactccactggacaaataggaagcaacttctacatcactgatcttgtgcatctccacagactctttcatgactttttcaatgtcatctacaacttcttcaaaggattttgtcgtatctcctgtgaaattcggttcaaaataccgtttgatcgtcattttcccgttctcataaacgaaataatggcccggctgtacacagaacacgcctttaaagaacgtctcattggtcggaacaaactgaaaagacaggtaatttcccaatgcatcttcattaaacactttatcaaacttcggatgctccaaaaaagatttgatttctgatccaaacatcaatgttccattcatctgcgcataataaagcggcttaataccaaaaatatcccgcgctgaaaacagtctttttgctttttgatcccagattgcaaatgcatacattccgcgaagacggtaaaccagttcttctccccactgctcatatccgtggatcaaagtttccgaatccgtattggaaacaaatgtatgtccagcctgaatcagttcttctctcagttcctgatagttatagatctcaccgttaaatacaagcaccttgcttctgtcctcgttatataatggctgatctccgctttctgaaagatcaatgattgaaagacgccggaatccaagtgccgcatcttcatccacaaatttgccggaactgtccggtccgcgatggatgatcgtatccatcatattctccagcacctgttctctgttctcaacttctcctacaaatcctgcaaatccacacatatactgtatatctcctcttaaaacttatgtaacctgtccttaacattcccagttttcagacaggttatgtagactcttttttcagatccggacattatcctgcccgcaacaacgccttttaatatatcacatgctatacttaaatccaagaaaaaccttactttctcgttttcttcattccgaatgaagtagccttgcgccgttcttcccacaactgatgccgggcttttgtcagctgctcctccagatcttttatcttttcgcaatagtagtttttttcctcttgttcggaaagaatatcaaaccggtattctacttccagccatgcaggtccgccgtccaactccggaatatccatcaggtactgcggatcatccgtcagaaagagactctttccacgatctgtagaagctgcattgactggtttcatctcgtgttccacagatcttccattgatcttcacactgcagatctcacaacggcacgctgcattgcatggatcaaagcgcatcatctttgcattttccagaagccaggatttttgaatcttatatcctgacatactcggccatgtctcgctgtcctcctcgcagaaaccgtttccgatatcatagtaacacttagattcctgacattcttttccactgatatatccggacacaatatcgctgtagaatttcattctctctgcttcaattcccgaatagtatgtcctgcattctgtaagctccggagatgccatcagttcttcatacatctcatcaaaccggctggcatactgataatccaccgcagcgatcttctgccagagcggcagccactctcctgccgggccatatccttccttgatctcttttaacagttcatctgatgtctttttctcaaatcctcttcccgaaaaattgttccgctcagcaagactgaaattggcttctgtcagatatccgggacctcccagataatcataaacataaaccggaacgcccattgcaagacacctcggtacggttcttccaatcgtaatgaccagatcatactgctgcaaaaactctgcattcacctgttccgtgcgatacccaagtccgatcagatccacctgataatacccgcccatcttttccttgagctccaaaagctcctgcgggatatgattggaaatgatcgcgatcttatccaacgctcttttgtatcctgcatactcgctgcttccttcaaaatactctgcttccacacagttttgaaaaacccgtatcttcgttccttccggaacctgcatggctaccatatctgcacattcaggactgacacacagaatgaaggccgcttcctgcgtacagaccggaagattctccatggcattgatcacactcagcttcgagacaaccattcgtttatattttaatccgtaccggctcacaagataatcaaacaccgggaaatgctggataaagacaatctcaaattccatctctttgagtgcctctttctgacattcaatcactgtgatcccctcttccaactcctgcagaagtggataagacttcttatatacagcaatcaccacatcatatcccttttctttgaacagatgtgcaaactccagcacatgcagctcagatcctgtaaacttctgaaaataaaggttggtaataagtacttttttcctttgttccatcttacttctccctgtctcccctgttttcctcttctaccgattatagcagacgcgggaatatttctccacccgataattgcctttttcaaaatcgaacaaaaaaagacactcgccaaagtgtccaacttgtgatcaatcggggtgacaggattcgaacctgcgacctcacggcccccagccgtgcactctaaccaaactgagccacaccccgtcgtgcaactaccgtttttcattatacaaaacttcccgaaaaaagtaaatgccctttcgaataaaaagtcaggcagagttatcctcataactccgcctgcttttttatgagcgcttacatccgcaattcggatttttatcaaactcaggattgaatgcatagaagtttttgctgtccaggtgttcctgcacgatccgaagattttcaccgaatctctggtaatgcacgatttcacgctgacgcaggaaacgaatcggatcacagacttccggatcttttacaagcctgagaatgttatcgtaagtcgtacgggctttttgttctggtgcgacctcgtaagaacaacatagctggaaacccttgaaaacacgccattttgcgtaggacaagccttttcctgctacgattgcataagaacaaaaacatagaaaaatgaagatgaagcaagctatcctacatagttccaatggtttcagcaactaagacgttcaacaatgagcgtctattttttttacccaaaatgaaaggagaatcaaacattatgaaaaagattatgaagcgattgcttacaggtgtacttacccttgcaaccgtatttactgcattacctgtcacacaggttcatgctgcggattccgtctatactactacggacggtaaagcaggaacaatcgtcaagattgacaatggtggttcagaggtttccagctttgaagaaagcataatgaacgctgacgggcagattgcctactgtattgatataaacacaaatttccaatcgggatataagaatcgtatcaatgcaacggagcgaatgagcgacgaccaaatatctgatgtggcgttgaatctggaatacgtcaaacagtatgcagaaaagcacagtctttccagcaaacaagtctatctgttggaacaatgtgttgtctggcgaagattgagcgttcacttaggctgggggtacaacaatgtacgagctgcctatgatgaagtgtcagagaaaatccagtcagaagtctatgagaacgcaaaggctttcgctaaagaaaataaataccgttacgattgcggtggttacatctatgttggtgaaggacaggacttaggacagttctgggcgaagttagctgtcggtgatggcaagattcagaaatcgtccagtaatacagcgattacaaaatctaatgactgctattctttatctggtgcgacttatggtgtctattctgataaaggctgcacgaaatcagttgccacacttatgacagatggcaacgggaatacggatacggtgaagttgagagcttctacatactatgtaaaagaaatcgaagctccaaaaggattccagttagataacaacgtctatacccttacggtaaaggctggtgaaacttccacattgaaagtcagcgatacaccaaaagtcacagacactttggttgagcttttcaagattgatatggaaacaggaaaagcaaccgcacagggtaacgcttctttagagggtgcggagttcgtctggaagtattatgacggttattacacaaaagataatcttccatcagaaccaacacgcacatggacgacaaagacaaaagcggaaaaaggcagcgataacactatccactatatcacaagattggcagattcctataaggtatctggtgacagcttctatacacaaaacggtactatctgtttaccgtttggtactatcactgtagaagaaaaagctgctccaaacggttacttgttagatggtgcttatatgcaagccgctggaagttctgaacagataaaaggcgtgtatgtggcacagattacagaagatggcgaacttgcagcattaagcggcagcaaccagtattccgtatcggacaagattatccgtggaggtgtgagaatccaaaagcgtgaccttgaaacaaaagacacaaaaccacaaggcggtgcaacattgaaagatactgcctttgaaatcatttccttaaatgataatgcggtattggtagatggcaaattatacaacaaaaatgaaacagtcaagacaatccatacaggcgttgacggtatcgctacgactgccgcagatactttaccttatggaaaataccgcttagaagaaagcaacaccccagagggatatttgacggacggtgcaaaaccgattgagtttgaaatcacagagaatggaaaaatcgttgacttaactgacgaagcacattccatctacaatcagattaaacgtggtgacttggagggtgtgaaaatcggtgacggtactcataagcgacttgcgaatgttccgttcaggatcacaagcaagactacaggcgaaagccacatcattgtgacggacgcaaacggtcagttctctaccgctgctgactgggtatctcatacacagaacaccaacgctggcgaaaacagtgaggacggtatctggttcggtacttccacaccagacgacagcaaaggtgcgttgctctacgatacctatacaatcgaggaattacgctgtgattccaacaaaggaatgacactgattcctgcttttgatgtgatagtttcaagaaataagactgtcattcatttgggtacattgacagatgattatgaaccagaaatctctatccatactaccgctgctgataaggcaacaggcgaaaaatcaattgtctctggtaaaagcgtgactatcgttgataccgtcactttagacggacttacaaaaggtacgaagtatcaactaaaaggctggcagatggtgaagtctgaaaacgcacagcttcttattgatggtgagcctgtggaaagtgattacactttcactgcaaaaaaatcagagatggaagttgaggtttcttatacattcaatgcttctgctcttggtggtaaagatcttgtaacttttgaggaattgtacgatttatccaatccagacgagcctatcaaggtggcagaacataaggacattgaggacgacgggcagactgtgagaatcgaggaaagaatcatcaccattcataccacagctaccgacaaggcaacaggtgaaaagatgattgttgctggtaaagaggtgactgtcattgatacggtcactttagatggcttggaaaaaggaacaaaatatcagcttaaaggttgggaaatggtgaaatctgaaaatgcagagcttcttgtgggtggtgagcgtgtggaaaatgaccttgctttcaccgctacggacacgaagatggaagttcagattacatttacattcaatgccagcgagcttgcaggcaaggagcttgtgacatttgaggaattgtacgatttatccaatccagacgagcctacaaaggtagcagaacataaggacattgaggacgacggacagactgtgacagtcacagagcgtatcattaccatgcatacaaccgctaccgacaaggcaacagggaaaaagacaatcgaagctggtaaagatgtgactatcgttgataccgtcactttagacggacttgaaaaaggtgtgaaatatcagctcaaaggctgggaaatggtgaagtctgaaaatgcagagcttatcataaatggtaaacgtgtagaaaatgaccttactttcaccgctaccgatacgaagatggaagttcagattgcatttacattcaatgccagtgagcttgcaggaaaagagcttgtcacatttgaggaattatatgacgtgacaaatccagacgagcctatcaaagtagctgaacataaggacatcaaggataaggggcagacggtgacagtcaaagaaaaaccagaatcccctgccacatcagaagaacccagcacaccaacaagaacaggcaattcaccaaagacaggtgacaatacaccatttgccgcattgttcgctatgatggggatttccgctgttggtcttatttttgcaggatataagagatttcgcaaagtaaagaaagttaaataatacgggaggtcacagtatatgaaaacttcccgttcaccgcccaccataaagaagtcagtctgtaactgacagcttaaccaaattctgcttgattatcatttatctttctgaatggggattgtcaagggtgcttcaagcacaacgcttgtccttgatgattcacaggcagacagatactatccagacagcagaatgacactatcaatcattaaaaatatagaaagaaaagaggtaaatacatttatggaattaaaacacgttatccctaacatggaaagaacattcgggaatttggaatttgcaggtgagaataaggtggaacagcgtaggatcaacggacgtatgacggtcgtttcccgtagcttcaacctttattcggacgtgcagagagcagatgatattatcgtggtgctgcctgcttctgctggtgagaagaactttgaatcagaggaaaaagtaaaacttatcaatccaaaaatcaccgcagagggttacaaaatcggtacaagaggattcacaaactatatcctgtcagcggacgatatggtgaaagcataaggaggaaaaatttatatgagattagcaaatggaatcattattgataaggaaaagacattcggagtattgaaattctcggcgttgcgtcgcgagatacatatgcagaatgaggacggtacggtttctgaagaaatcaaggaacgtacctacgatttgaaatgtaaagaacaggggcgcatgatacaggtaagtattccggcttctgttccgttaaaggaatttgactacaacgcagaggtggaaatcatcaatcctgtggctgatacggtggcaaccgctacatttcaaggtgcagacgttgactggtatatcaaggcagatgatattgtgttaaagggtaaaataaatcaaatggcaactaataatatattaccaaaaaataaatagtatagataaaaattatctgatataatcatttatagaaagtgggtgattatatgagtaaaaaagcaaaaagttttgaagaattttattctaaaaataaagatgatattttggatattgatattgtagctgattatgcagagtcccatgatggggatactacaccatttgataaagatatgttttgtccagaatgtaaacaagcagaattgagttttgttcataaaacttctaaacgtcgtgctcatttaagaagaattaaaagctcaaatcataaagatggctgttcatataactatgaatatgcttccaaaaagacagtcaaaaaatatgtagattctttaaattatgaggaaatacaagataagttaaattcaattatgaatatgttatgccgaaaacataatacgaaaaagacaaccagtaatgataatgaggatttaacgaaaaaaagaaagaatcctatgcttatcccagaacgaaaagattgcgaaactgttttaagagcattgcaacgaaaaagacttaatggctggattgacgaatcagatggtgaagatttttgcgtattctatggcaaagtaaaattaaaagttatagaaaaagaaaaaaatagcgatgacccaaaaaagacttataaatattacctgctacaaatatatacccaaaataaaaaaggcgaatggaaattcagaacaagtttatatcgaggtaatatgcgagatttagtaaatgaagaagtaatgtataatattgtaatgattggacacttggattttcaatttaagccatttacaatcaaattagcaaataaaaacgctatcaaatatcgtgaagcatagttatagagcagtagattctacagaatttactgctttttctatatccaaaggaatgtttatgaatttactgaaatataaaggaaaacatattcgagtcagtgacaaatcattggtttttcgtttctcggctggttcactgttcctgctgttccttgctgtgattatgctgctgaacctaaagtcaatcctcactacggactggaaatcggtcagctttctacaagatggcaacgtccatttagtagtcacaccatataggatagtgactattgttgtggcggctctggtctgtgtgctggctgcccttttctatcgcagattccagtatgacagagtgaagcagctctttcaccgtcaaaagctggctcgtatgctgctggaaaatggctggtatgaatcagaatccgcacaggacagcggctttttcaaggatttgccagccactaccaaaaaagagaaaatcacctattttcctaaagtgtattaccgtatggagcatggacttatatatatccgtacagaaatcacattggggaaatatcaagagcagcttttacacttggaaaagaaactggaaacaggcttgtactgtgagctggtttccaaagagctgaaagacagctatgtggaatatgtgctgctctatgatacgattgcgaacagaatcactatcaatgaggtacaggctgaacatggcagcttgcgtttaatgaaaaatgtctggtgggagtatgacaagctcccccatatgctgattgctggcggcactggcggcggtaaaacttactttatccttactatcattgaagctctgctccgcagcaatgcggtcatgtatattttagacccaaagaacgccgaccttgcggatttgtccgttgtcatgccggaagtctggtacaagaaagaagatataaccgcctgtattgatagattttatgatggtatgatggcaagaagtgaagctatgaagctcatggaaagctacaggacaggtgaaaactatgcctatctcggtcttgctccgtattttcttatctttgatgaatatgtggcgttcatggaaatgctgacaacaaaggaaaatgccgctgtgctgaataagctcaaacagatagtcatgcttggacgacaggcaggatattttctgattctcgcctgtcagcgaccagacgcaaagtatctcggtgatggaatccgtgaccagttcaatttccgtgtggcattggggcgtatgtcggaacttggttacagtatgatgttcggtgaagtagacaaggacttttttctgaaacagatcaaagggcgtggctacgttgatacaggaaacagtgtcatatctgagttttacactccccttgtacccaaaggacacgacttcctaaaagagatagggagattatcacaaaacaggcaggacggacaggcggcgtgcagcgcgaaagccgcaagtatggactagcctgtgttggggtggcgtgagccgccccaaccatctgcccccgttatctaacaggggggcacaaattatctggaaacagtcaattacatatcgaaaaatccttgaaaacagaggacttttcaaacattcaagggagtgtgacaaaatcggtaactgtcacattcctttttcgattggagggattgaaactgaatgataccgactggataaatgattttaaggaaaaacggacgcagtacggcgtttcccagaatcgtcttgcggtcatggctggtgtcagtcgtgagtatgtcagcaggattgaatctggaaaagtagccttgacagaagaaatcaaggggaaattcacggacgctctggaaaagctgaatccagacaatccgctggaaatggtcttcgattacgtcagaatccgatttcccacacaggacgttaagcacgtggttgaggatattctcaaattaaggcttgatgtgatgatacatgaggatttcgggttctactcctatgcgaaacattatgtcttgggtgatgtgttcgtgctgacttcgcccgataaagaaaaaggcacattgctagagctgaaagggaaaggctgccgccagatggagagctaccttttagcacagcataggagctggtatgactttctcatggacgctctgatagagggaggtgtgatgaaacgtcttgaccttgccatcaatgatatggcaggaatcttagacattccagagctgacagagaaatgtaaccatgaggaatgtatttccgtattccgcagcttcaagagctaccgcagcggtgagctggtgagaagcaatgaacaggataaatacggtatgggaaatacattgtatatcggttcgctcaaatcagaggtttatttctgtatctacgaaaaggactatgaacagtacgcaaagtatgacatagccattgaggatacgaaaatcaagaaccgttttgaaataagattgaaaaatgagcgagcctattatgcggtgcgtgacctgctgacctaccatgacgcagagcgtaccgcttttgatattatcaaccgttatatccgattcgctgacaaggaggtggagaaacgacgcagcgaatggaaaaccaatgagaaatgggcgtactttatcggttctgatcgtgggcgtctgaaactgacgaccaaaccagaaccgtacacgctcacaaggacactgaactggataagcagacaggtcgctcccacatggaaagtcttgcagcagatagacagtaccaacggtacgacctatctcaaagatattttagaccatgcgaagctcacggagcgtcacaagaaactgattgaacagcagacaacttctacagaggaaatcatcaacaaggaggaatgacaacatgaaacatatcttatttgatttatttttagtatctcttggttcaggtatcggagtggttacaatgtgtctggtacgggctggcagccagtttgacagagatatggaaatatggaaaagaggtgagaaataatgaatttcggacagaacttatacaactggtttttatccaatgcacagtcacttgtgcttatggcaatcgctgttatcggggtgtatctcggtttcaagcgtgagttttccaaacttattggctttctggtgattgccttaatcgctgtcggtctggtattcaatgccgctggcgtgaaagacgtactgttacagttattcaataagattatcggggcgtaatcatattgttatatcctccgcaagatgttataatttgttgtaatttaatgaattgcggaggaatgattatgaaagattttattgatttcttaaaattaccgcctaatattctaggagctttgtctattgcaagcggagcattattactattgccagaccagttggctaaaaggctatatatgacagagtttcgtgataaatatggatttacaataggtattatttttgtcgtttcaactgctatactaatagttcttatagttagtaaaatatatcattacttttatgataagcattcatcaaaaaaattggttgaagcacaaacaaaatatcttaaaagaatgacaccagaacaagttattgtgattcgggagtttatcaatgaaccaacacatacattgccacttccttataataatggattggtaattgagttacaacacctgcaaattattacaccagcaggacaaactcatttggtagatatgttagaccctcaaattcaattctttttgcaaccgtgggttattcagagaattaacaatgatgatgaattaaggcaaaaattttattaaaatgaattagcagtaaatcataataggtttgctgctttttttatacaaaatttttagattggaggacaacatgaaaacagatatttttgagaatatgaaagattatatcggctgtaatgatgtttccgacctgccttaccgcaagcgtgaggtatgggaagaaatcaaacgacagatacctcttcaatatcctaaagaacagttagaaaagttttctcattatgtgtttggtgtagattatgctgttataatgggaatactggatatgatgaaaggaagtgacagaccatgcaggaaatgcgagtttacttgttaaataatacaaaaccgtatcgtgagggtgacgaagaatattctggtgcttggttcaactgccctgtggactttgaggaaatccgagaaaaaatcggtgtggaacatgaagaacagattgagattgccgactatgagttgccctttgacttacacagcgatacgcagctctgggaaatcaatgccaactgccgcatggttcttgaattggagggtacgcctgtcggcaatgaaatgaaagccattcagcagaaatggttttccagctttgatgaatttatcgaccataaggacgagatacgctactatgatgtgggcgacggcgcggctttggcagaataccttatctgtgaggaaaacgtattcggtgagattccacacgaactgcaaaagcatatcgactatcactcttatgggaatgagctggaaatggacgacagatacttatttactacaagcggcgtgttccgctatcagtaaaggggtgatgtggtatcgaagaaatgcgaatctatatcgccaatcttgggaaatacaacgagggtgagcttgtgggtgcgtggtttacgccgcccgttgattatgatgagatggcagagcgtatcggcttgaatgagcaatacgaagaatacgctatccatgattatgagctgccctttgagattgacgaatacacgcccattgaggaagtcaaccgcctgtgtgaaatggtggagaacttaccagaggacatacaggacgaattatcggagctgctaggctattacagcagcttggaagatttgtgcgaacacgcagacgatattatccattatcccgattgtagtgatatgacagacgttgcctattacttcatagatgaatgtcaaagtctgggtgagataccagacaggataagaagctacatagactatgaagcctacgggcgtgaccttgacttggaggggcgttttgtcgtcaccaatcatggggtgtttgaatgtccataacaactgaatattttatcatcagccagtgaaatgacactggtattttttatgcagcagtttgtgaaatacaggctgctgtttccattttagaaaagaaaggagctgtgaaaattgaagaaaatcaaaagctatacaagcatatggagcgtggaaaaagtcatttatgcaatcaacgactttcagctcccgttccctgtcacgttcagtcagatggcttggtttgtggtatcgctgttcgtggtgattctctttggggagctaccgccctttaacatgattgacggggcatttctcaaatactttggaatccccgtcgcttttacttggttcgtatcgcaaaagacctttgacgggaaaaagccatttagatttttaaaatcctgtgtgagttttttactccgaccaaaagtgacctatgcaggaaaagccattaagctgaaacatgaaaaattcaatcccgttattacagcagttaggagtgtgatgtatgttcccgattaaatatattgaaaacaatctggtgttcaaccatgacggtgagtgtttcgcttactatgagctgacaccttacaattattcgttcctgtcaccagatgaaaagtacatggtgcatgacaacttccgccagcttatcgcccagaaccgtgacgggaaaatccatgccttacagattgccacagaggacagtttacgtgcagtacaggagcgttctaaaaaaggaatcacaggcagattgaaagaaatagcctgtaaaaaggtagacgaacagacagaagcgttggttgagatgattggggaaaatcagattgactaccgttttttttcttggcttcaagctgctagtgaatgaggaagaaatcaacctaaaaagtatgaaaaagtcggcagccatgacctttacggattttctctatgaagtcaatcacaagctcatgggtgactttgtttccatgagcaatgatgaagtggggcgttttatgaagatggagaaattactggaaagtaaaatctcacgccgctttcagttccgcaggctggataagaatgatttcggttatctcttggagcatatctacgggaatacgggagttgcttacagtgattacagttatgatttgccagtaaagaagttaaagcgtgaaacgctggtgaagcgatatgaccttatccgacctacacgctgcatgatagaggaaaaccagcgatacctaaagattgagcgtgaagatcagacaacgtatgttgcctacttcacgattaacaatatcgtgggtgagcttgattttccgtccagtgaaatcttctactatcaacagcagcaattcacgtttcctgtttccacttctatgaatgtggaaatcgtcactaataaaaaggctctgacaacggttagaaataaaaagaaagaattgaaagacttggataaccacgcttgggaagcaggcaacgaaacaggaaataacgtcattgaagctctggattcagtcaatgagctggaaacgaacttagaccagtccaaagaatccatgtataagctgtcctacgttatccgtgtggcggctaatactctggaagaactgaaacgccgctgtgatgaagtcaaggacttctacgacgatttgaatgtgaagctggtacgcccattcggggatatgttgggattgcatggtgagtttatcccagcaagtaaaagatatatcaacgattatatccagtatgtcacttctgactttctggctggacttggattcggtgcgacacagcagcttggggaaacggacggtatctatatcggctataaccttgatacaggaaaaaatgtatatctgaaacccagccttgcggcacagggcgttaagggttccgtcaccaatgcgttagctgccgcttttcttggttctcttggcggtggcaagtcattttgtaacaaccttatcatctattatgcggtgctgtttggaggaaaagcggtcattgtagaccctaaatcagagcgtggcaactggcaggaaacactacccgatattgcacatgaaatcaaaatcgtcaaccttaccagcgagaataagaacaaaggacttcttgacccttatgtgattatgaagcgtacaaaagacgctgaaagccttgcgattgatattttaacattccttacaggtatttcttcccgtgacggtgagaagttccctgtattaagacgtgcaatccgttctgttacccagagcaaaaaaagaggactgctccgtgtcattgatgaactccgcaaagatggttcactcgtggcagagaatatcgcagaacatattgagagcatgacggactatgattttgcacacctgttattctcggacggtgatgtggaacaatccatcagtttagaccgacagcttaacatcatacaggtggctgaccttgtattgccagacaaggacacaaaatttgaagaatataccacaatggagctgctttccgtggcaatgcttatcgttatcagtacctttgccttagattttatccattcggacaggagcattttcaagatggtggatttggacgaagcgtggacgttcttgcaggtagcacagggaaaagcactctctaacaagctgattcgtgctggtcgttccatgaatgccgctgtgtactttgtgacacaaaactctggtgatgtggacgacgaaaagatgaagaacaatatcggcttgaagtttgcctttcgtagcacagatataaaagaaatcaaaaatacccttgaatttttcggtgtggataaggaggacgagggcaaccagaagcgattaagggatttggaaaacgggcaatgcctgtttcaagatttatacgggcgtgtgggcgttatccagattcaccctgtattcgctgacctgttccatgcctttgataccagaccgccagtgcagacggaagaaatgaggtgaagcctatggacaagagaaaaatagtccgttatctgcttatcacgctttcggtgattctcggtgtgctggtatttttatctatcacgagtacggtagttcatgcggctggtctggtagacaattcggtgagtgacgctaacacctattctaaatatcctctggaaaactaccagcttgatttctatgtggattcaagttgggattggttaccgtggaactggcttgacggtatcggcaaaagtattcagtacggactatatgccatcacaaactttgtctggacggtgagcttatacatttccaatgcgacgggatatgtggtacaggaagcctacaagctggactttatctctgataccgcaagctctatcggaaagaacattcagacgttggctggtgtcacttccagcggtttttccagcgaggggttctatgtgggattcctgcttatccttattctggtaatgggtatctatgtggcatacacaggacttatcaagagggaaaccacaaaagcagttcatgcggtgattaactttcttgtggtattcctgttatccgcttcttttattgcctatgccccaaattatatcagtaaaatcaatgacttttccgctgatataagcagctcggcgttatcgcttggcacaaagattgtgctgcccgattccaacagtaaaggaaaagacagtgtggatttgataaaggacagtctgttttccatacaggtgaaacaaccgtggctgctcttacagtatggggaatcggatatagaaacactcggctctgaccgtgtggaaagcctgttatcggcaagtccagatacggacgatagagaagatatagtgattgaggaaatcgaaaataaggacaatgacaatctaagtgtcacaaagaccatgacacgtttaggtatggaggtgttcctgttcatcttcaatatcggtatctcgatttttgtattcctgcttacgggcatgatgattttctcgcaggtgctatttatcatttacgctatgttcctgccaatcagttttatcctgtctatgattccgacctatgagggcatggcaaaaaaggctcttacgaagctgttcaataccattatgatgagggcaggaatcacgctgattattacgacagctttcagcatatccactatgttttattccatttcttctggctatccgttttttatgattgcttttttacagatagtcacctttgcaggaatctactttaaactgggtgatttgatgacaatgttcagtctgcaatcttccgacacacagcaggtcagcagacgaatcatgcgacgaccttatatgttccttaaccgtagggcaagacgcttggagcgtaaaatcggaaggacggttgcggctggtgctgctggcggtgtcgctggtgcggcggctgcttctgcttctacgaaaaaagcagataatacaaaatcagcaggcagcggtcataccagaccaaacaatacgccatcttcccatagtggaggtaacggaaagccgccagctctgccaatgaatcagaagccgcttgcattacccgataagcagaacaacgattcttcgcaatcgacagtacatagcagctctgcaagccagacgcaggaaatgaagtccgcttctaagcgtggtatcgtggataaaaaagcggtatcgaaacaaccgcaatcagaaaaacagaatccgcagcgtccgatagtggataagacacagaagaaacaggaaacacaggataaggagcgacaggacaatggatcagcgacaaaagctggtacagcgaaaggaactgccccattgcatgagcgaccagtgacaacgcctgtatctgcgaaagcagctccacagtcggcaggttctaaagaagaacagaatatcaaagaacgccctactactgttaagagggagcaatcacaatctgccagagcaaaagagcctgtcacaaagcaacaggaagtaaggacgcaggttgccagagaatcttcttctccagcagctacaccaaaacattcgggaactgtgacagatatgccccgtcagacagtcaaacatcaaaagcagacaaagaccgtacagaaaaagaccacaaacccgtcaaccatgaagaaaacgaccagcaggaaaggcggtaagaaatgaagctaagacacttcgctgtgttcggtgggatttttacggtgattatctgtctgcttttgttcctgtttatcgtgaccgcagatgatgaagaaaacagcacttcctactttgatttttctggactgaatctgtcagaggaagtgctgaaacatcaaccgacggtagaaaaatatgcgaaagaatacggaatctcggactatgtgaactatctgcttgccatcatgcaggtggaatctggcggtacagctacggacgtcatgcagtcgtcagaatcaatggggttgccgcctaattccctctcgacggaggaatccatcaaacaggggtgtaaatacttctcggagcttttaaaatccgcagaagcaaaaggctgtgacattgacacagtggtacaagcctataactatggcggtggcttcattgactatgtggcgaagcatggaaaaaagtacacttttgaactggctgtcagtttcgctaaagacaaatcgggcggtgtcaaagtcacctataagaatgagatttccattaaggaaaatggcggctggcgttataagtacggaaatatgttctatgtccgtctggtgaaccagtatttagctgttcccagtttcagtgacgctaccgcacaggcaatcttcaaagaagcattgaagtatcaaggctggaagtatgtctttggcggcagcaatccaaacaccagctttgactgttctggtcttacgtcttggtgctatgggaaagctggtatcagtctacctcgtaccgcacaggcacagtatgacgctacgcagcacataccgctgtcacaggcgaaagctggtgacttggtattctttcactccacttataattctggaacgtatgtcacccatgtgggaatctatgtaggaaacaacagaatgtatcacgctggcgaccctattggatatgcagatttaacaagcccgtactggcagaaacacttgattggtgctggtcgggtaaaatcaaaatagaaaggaaatggtactatgatatttaagaaaaaggacaaggaatcaaaaccgaaaaaagagaaaaaagtgcctgtgatgaaagtcggcacacacaagaaaactgtgattgccttatggttggtgctgattacaagcgtcagctttggggtgtataagaatttcaccgccattgatatgcacacggtacatgaaaaggaagtcattgaacaaagaattgttgacactaacaggatagagaactttgtaaaagcctttgcgaagtcctactattcttggagcaatacgcaggaatccattgataaaagaaccgcagccatcaacaattatctgactaagagcttgcaggatttgaatgtcgatacggtaaggcaggatatacccacaagctctacggtaacagatgtaaagatttgggatatagaacaggctggaacagacgactttaccgttgtctactccgtagatcagacggtaacggagggtgaaacgtcaatcggttacacctccgcttatatggtagtggttcatgtagatagcaatggaaacatggttatcacacagaatccgaccattagcagcacaccgacaaaatccagctatgaaccaaagacaaaggaatctgacggaacggtggatgctgccacaacggaggaagtgacagagttcttggaaacattctttaagctgtaccctaccgctacggaaaaggagcttgcctattatgtatctggcaatgtgcttgaacctgtaaactgtggttatctgttttcagagttggtaaatcctatcttcatcaaagatggggaacaggtcaaagtttcggtatcggtgaagtatctcgaccagagaacaaaagcaacacagatttcacagtttgatttggtactgaaaaagacaggcggtaactggaaggttgtgggatagcatgaggaaaggcttacaaatcataccgaggtatggtttgtaagctgattattggagttgttacaattaatttaagggattataataattgcagcaggtaaaatgcgttattgtttgaatggatatatggatatgaaaatgtaacattgtaattgatgtaaaaatgtaacattgtaattgatgtaaaaatgtcaaattgatagtcacacgcatgtaatagatagaagttgttaaaaaattgttttttccatgataagatatactgactaaggaggaacgaattatggcacagagtattttgattgtagacgacgaaaaagatattgtatcaatgttaaatcaatatttttacaagattggttatgtagtgtatacagcaattaacggaaaagaagcactaaatgcaatcactaaaaaccccgatattattctgttggatataaatatgccagatatgaatggctttacagtttgtgaggcgattagaaattatgtttcctgtcctattatttttttaacagctcgtgttgaggactgtgataaaatcaaggggtttgctatcggtgctgacgactatgttgtaaagcctttctctattgatgaattagaagctagagttgctgcccatttgcggagagagaaaaggcatagttcgtctgcaatagtacagttcgataaaaatatagtaattgattattcatcacgaacggttttttataaaaatgctgaaataaactttacgaagaaagaatttgatataattgaatttctttcacaaaacaaaggtattgttttcgaccgtgaaacaatctatgaaaaagtatgggggctagatggttgcggtgacaattctgttgttacggaacatatacgacggataagaacaaaatttctttctatgagtgataatccttatatagaaactgtttgggggtgcggatataagtggaaaaaataagggaaaaaaaattagtatactatattgagaacaggagtattaaaatttcatttattctttacgcacttatttctttagtagttggtattactataagtgttactgccattgctcttgttgataattatagaatgaatcttaactataaatatgaggacatgacaacaagatatgatatacctgaaaatggttcatttatagcaaaatacaataatgaccagacagagtatacaatatataatgcaagccaaaagaaagtatgtagttttgttgtagactatcaaaaagaacgcccggtacaagaatacgtttatccaaatcatgtttcttatattgaggtctcaccaaactttaccaaacaagataggattgtagatactactttaggaatgataaatattgccactattcctgttgttctttcattcagtatgatactttgcgtaactatttttataaaacgaaaattggcgagaccgataaagttactaactaatgcttatagcaaaattgaaaacaacgaattggactttactctgtattacccatataaagacgaaatgggtaagctgtgtcttgcatttgaaaaaatgaaaaattgtttatatcaaaacaatcaaaaaatgatacgacagtttgctgaacaaagacgattaaatgctgctttttcgcatgatttgcgtactcccttaacactacttaaagggcatactacaatgttgttatcatttattccaaaaggattagtttcccaacaagaggtaattgatgaattatcaacaatgcgtaagaatgtggaacgacttgaaaaatacgttaatgccatgacgaatctataccgattagaagatatagaaatcgaaaaagagaccataaactttaacttactgttaaaagctttgtcagatacaacagaactgctttgtacagacataaaatactctattaagacaagctgtaataataacgaaaacctatttatcaatcttgatattgttgtacagatttatgaaaatttattatctaatagtattagatatgccaattcaatgatagatattgacattagtatgaaaaaacaatatttattgatttccgtctccgatgatggctgcggttttaaggatagtgatatagagcgtgtgacattaccgttttacaaatcgtcgcaagacactacgactgaacatttaggtctaggattaaatatttgtaaaatattgtgtgaaaggcatggaggtacattgaaaattgcgaataatgataagggtggagcgtgtgttacagcttggataaaaatcatagatgttgatgaaaaatagatatttgctccatataattggactaaacatttatcgaggaggttttaaaaatgaaaaaatgtatctgcataattttagtaatagccgtaagcattttatctgggtgcaattcatcacaaaatgaggaaaatgtattcccacaaaattttaaagaatattacgaggtttcgccttatggaaatgaagaagaaatcaattctttatcagatgttgaaattacattagataaaaaatgggattttaacttagagaatgcgacattttttatcgagaacaactctgataaagaataccattgttcaaaatcttattttgaaatcgaagcagaacaatcagatgtatggtatcaattaactcaactttctgacccgtcaaaaaacaatgaagatgatgttattataaaaccatcagaaagattgaggttagcatatgatatttcttcgttttatggtgaactcccatcagggcattatcggataattataagtgtttcttattttgaatccccaaaagattgggattatgacacatattatttggcatgtgagtttacaataaaatagcatattagagagaaaacgaatgataacaaaaaaatggatatactgccctatatgcagaaataaaacacgcacaaaaatacgaaaggatacagaattgataaattatcctctattctgccctaaatgtaaacaagaaagcctaatcaatgtaaggcaacaacaaataactgttatagagccagacgctaagacgcagagccgataacaccgagaataagtatttcttgggttatcggcttattttattggtaatcaaaagtggagcgttattcttccgctacttccttagacttgatgattccgttaggtaagcgcaaaataattcgacggattgtgttgccctaaaaatcattccataataatcattagaaaatgcaagcatttcactttatcttctcttgccagaaatgatagatgcgagcattttactctatccgatttatggaggtgtgctcatgagaagcaaaagaatacctgccgaagaacaataccgtctcatcatggaatgccgtcaaagtggattgacagatcatcaatggtgtgtggaacacgacatcaaaccgggaactttttacaactgggtaaaaaggctgcgtcagaaaggttgtgtggatttgccagcgtcaaccggacgcatctatcgtgcaccggaaaaccaggaagttgtcagagtggattttcatgatactgacccgctccaatatgaacagccattaaatgtgattccggtagctacggaaagaaataacctttccgtagcagagccaatgaagctgtctgtaggaagctttcatctaacaataccaaatggaacagatcctcagcttctggctcaaacgcttcgcattgtgaaggagttggaatgttaggggatatcacagccgccgatgaaatctatatcgtaacaggcagaacggatatgcggaaatccattgacgggctgtgtgctattgtagaggatcaactccatatggatccaaggcgaagtgccctgtatcttttctgtggaaaacgttgtgacaggatcaaagctttgctctgggaatctgacggatttgtgctgctgtataaacgtatggaagtccagggaagattccgctggcccagaaatcagttggaagtaaaacaattgacctggcagcaattcgactggctcatgtccgggcttgaaatcgaacaaccaaaggcattcaaacctacggaatgatcgcgtaaaacatctatgccaaccaacagaaacggagggggttctcaccctatatcatgtctgaaatcccttgtaaatgctgggttttctgcttctttttcattgctttttatggtataataagagcagtgaaaaaggagcagaaaacatatggctggtaattcaaaagattcaaaaatcctcgcgtacaaggacatgatcaaccaactgaataagacgatttccacacagacagaactgattcagtctttacaaaaaacattggaagcagaccgtctggaaaaagaaaaccttcgtcagcagattgaatatctcacgaagaagctttttggtacttccagtgaaaaacggaaagatatcgatggtcagctgaatctttttgatgaagccgagcaggaagcagatccgacatggaaacaggaacttcctgatgacatcactgttccggaacataagcgaaaagcacgacggacacatgcagatctctttaaaaatgttccttcctgcgacgagatcatttctcttccggaggaggagcgaaactgtccaacctgcggaacgcagatggaatgtattgggaaagaattcgtccgccatgaatttcgctttacccctgccaaaggaaaagtagtaaatatctatcgtgaaacctataaatgcccggaatgtgccatatcagaggaacacccagatgatcagacatttgtcaaagcgcctgtccaggaaccattgatcccagaaagttatgcatcggaatccgttgtaggatgggcaatgcaccagaagtaccagaatggtctgccattaaaccggcaggaatcggaatggaagcagctgggtgtcccattaagccgggctacgcttgctaactggatcatttactgtgccgagaattacctctgtcatgtttatgattattttcaccgtcagttacggatgcgtaaatatctgatggcagatgaaacccgggttcaggtactgaatgagccggagcgcaatcctgaaacagattcctggatgtggctcttccgcagtggagaagatgggcttccgccgatcctgctctatcattacacagagacaagggcaaagttccatgcggcatctttcctacaggggttcagcggatatctggagactgatggataccagggttataacaatctgccggatatcaaacgatgctcttgctgggcacatgtgagacgttacttcacagatgccataccgaaagggaaagagtatgattacagccttccggcagtgcagggagtacagttctgctccaagctgtttgattgtgagcggtactcaaaagcaaaaaatcatactgcggagcagagaaaacagttccgtcttgaaaaggagaagccgatactggaggcattctggaattggctggatcaacagcgtccaaacaagggaacccgtttggcgaaagcggtgaactatgcccaaaatcggaaagacaccctgatgacctatctggaagacggtcattgcagtttatccaataatcttagcgagaatgcaatcagaccattcactgttggccggaaaaactggctgttcagtgccagcccgaagggagctgcctctagcgctattgtgtatacaatggttgagatggcaaaagcgaatgacctgaatacctacaaatatctgacatatctcttatcacagcggccagacgctaaaatgtcagatgaacagttggaacagcttgccccatggagcgagactgcgaaagcgaactgtcaaaactaaacatagagcaaaacgcttgcatctatcattttggtgcaagcgtgattcatgggcagcgtagcaatattttgcgcttactccgttagcgacactttccatgataactaaatccttatcggaaaggttgtcaagttgcttttccaactgtcgtcttctggtgcttttatccagatcagacgcaggcaagaaaaattcatcaacagaaatattgagcaatgatacaaggtcatagaatacctgtaaacttgggtgctgtcctttattttcaatatttgttagataacgtgggtcaatctcaatcattgttcccacttgttcacgggttaaaccctgtttcatacgagcttctttgatggcaagaccaaaagctctgaaatcgtacttatcttcttttttacgcatatgtaatcacctcactatattctacagttcctgttgattttctaacaggtatagaaaaacgtatagtaaggtttagcagttcctattatgcgtaaatcaattaaaaagtgctgcatagcggcaaataaaaaaaccgctatcaacagtaccgtttttgcgtgtcacaaaatacctttttccagatggcggttgaaaagccgcctttttcttttcccatcaatagaaaaacaacataatggttttgggttagcggctttgggaggtagccgcattgaaagacctgtataatcgacaatcttcaatatatccgttattttcaaaaaaatcctagctttcacagcggcacaatatacccttgaatatggtttttcacgttacataacaggaacaattttaaaagcacaagaacagcatttcttatatgcccttgtgctttttttctactttaaaaaattttttgatttttttctgattcgggttacaaatcgcccctccgtgttgagtgttagtgcggaaagaggtaaaaagccttttcgctttagcaacttcaacttgaaaggaggtgagattatgaaaccttcttcatttgagaacgctataagacttcaatttgactgtctggctcgtaaggtgattggcagaactgtaaagaactacaacaaagaacttgccagacgtgcaaagcatgaaatatctttctgtgaaataccagagctggaattaaaccagttgggtgtatcggacgaatacccgattgaatttacttcctttgatgtgtttggtacagaagttcgtgtctatgatgagaaattatgtgaagcaatcaaaaaattaagcgaaagacgacgcaatgttgtgttgatgttctattttctggaattaccagacgcagaaatcgcagagattttggatatttccagaaactctgtttatagaaacagaatgtgttcactaaagctcattagagatatgtatgaggaggaattataacatgatgaagtctacaaaaaagtgtcctctattctccacaatcagtttagctgctgatggcgacgaagtggcaatagagaaaatattaaatcactatgacgcttacatatcaaaagcaagtttacgcccgttctatgatgaacacggaaatatgtatattgtggtcgacatggaactgaaaggcagagtcagagctgctcttattaaagcaattctaggttttgaagtcagagtgaaataagcgaatatatacggagtgttctatcacctcattccagctccgttttacaagtgttctttgaaaaatgaataaagtaatcagatacgtttgatatacggtgagccgacggactggaacgccatgacccacgaaaggaggaataaagaagcgagcgaccatgccagtgatccgtaagcgactgttggaaaagttgctgccatgacctgtatatcagaataatgatacacccgtatgacacggttcacccatcagaatgggaatggtgaaattccagtggagctttccaaagccatctgattacttcttatttatagacaaattctttcataatgtacaagcatttttgcatactttgtaaatatattgtagtgaggtggttcaatggcaaatgacgcaaaggtagtttgcaagaatgtttttaaaaattgtgatagagcggcgtttacaaaagcatttactctaaaatggatagagttgataaatcaatatgaaaaaaataaaggaaaggcaactcctgccagatgatagacaaactatcctacgagatgttataataacattatgtagagatagtttgtttcgtcttctctaaaaggagaacgaagcatgatagaatcaaaatcaagagttgctatttattgccgcttatcagaggaagatagaaacaaacaatcagaaacagacgacagtaacagtattcagaatcaaaagtcaatgttacttcaatactcattagagcatggttgggaagtctacaacatatacagtgatgatgattacactggttctgacagacgacgaccagaatttaacaggttgttggaggacgcaaagaatcgtaaatttgatattgtcctttgtaagacacaatccagatttaccagagaactagaattagtggaaaaatatatccacggtcttttccctatttggggtattcgtttcatcagcattgttgataatgcagataccgctaataaaggaaataagaaatcaagacagataaatggtctggtgaatgagtggtacttagaggatatgtcagaaaacattaaaagcgttctcactgacagaagaaagaacggacaccatatcggtgcttttgccctgtatggttacaaaaaagaccctgacgtaaaagggcatttgattattgatgaagaagctgcggaagttgtcagagaagtttttacactgttttcacagggatatggaaagaccgccattgcccgtatgctgaatgacagaggaataccaaaccctacggaatacaaacgacttcatggtttgcgttacaagcagcctaaaacgaaaaacagtaccctatggaaatattttgccatatcagatatgttggtgaatgaaatctatatcgggaatatggttcaagggaaatatggcagcgtttcttataagacaaagcaaaacaaacccagaccaaaagacgagtggtacagagttgagggtacacatgagccgattattgaccgtgagttatgggatagggttcaagcattggtagctcaaaaggcaaaacctttcacagttggcacaatcggcttatttgccagaaaagctcgctgtatgaattgtggttatacaatgcgttcatcaaagaatcgtggtaagcattatttacaatgttctaaccgccatgtagcaaaggacgcttgtataggttctttcatttcagtagacaaattggaaaaagctgtgattgatgaacttaataagttatccgcagaatatctggataaagatgagcttgaacaaaatgtgcaattcaataatgacttgcgaggtcaaaaagaagctttggaaacggagattgctgcttatcaaaaaaagattgcggaatacacaaaaggaatccgtgaactatatttagataaggtaaagggtattctttccgaacttgattacttggatttatctaaagatttctcaacacaaaaagaaaggctcgaaaaactggtaattgatacgcagaaacagcttgatgttattgaaagaaaaatgctgattggtgataacagacgacagttaatcgagcaatatacaaatcttgaacacttagacagggaaacggttgaaaagctgattgattatgtattggtcggtaagaaagaccctgtaactaaggaagtacctattgagatacattggaatttctaaagttctcatatctggcagctagtatgccagattattgggaactatcttttaaaacctcaatgttgtctttacacaatcgtaccatctgcagcgaggtcttcatgaagatctgtaatcggatcaccttttgactgaaaataggttgcagtccacggtgctccgcttgcagcctgtggccacaatgccagagtatgatctacatagtatggagcaaacccggatctctcaatttcttccggagaaagatttttcgtcagctgatgcacaatggcacagatcatttccatatgggccagttcctccgtgccgatatccgtaagtgttgctgtcacctctttatatggcatggtgtaccgctgagataaataccgcatcgatgcagcgagctccccgtccgggccaccaaatagcaataacctataatatttttacatattataaatatacacgaaaatgatacaatattcacccctcagagagctgatctccgagggggtttttattagaacaactggaaccgatcgattgcctgtccgaacgctccagcatatccgtcctgtccgtttccagtctcgttatcatactgccatgaccagtaagctccatttacagggctgacacggtactgggctttctggtagccgtattttgccgcataatctgctggagtattgtagtacacctcgattgcgtcaattggctgtcctgtaccggcataaccattattgtgatctttccagttgcatcctgtcacataaggtagccaccctcttccgatcacgtggactctgtattttacggagcctttgtctaccttaatagctacatccgtgatgcgcttgccctgaatcccggcaaagtctgtaagattccgcacgaacggcaagatgcgtccgtcctccagtttgacggcgtaagtaaatactacttccggctgtctctgtgcagcttgagcctgcgcctgtcctccagatacataagttggcggcgtgacattaccacccatgtactccttaatccgtttaataaagtaggattttgtagcttccctgccaccgtgaatctccacagatctgtgagggcaagatgtagcatacacttcctgatgtagccttatcgtgcttgtacttggtgtgattccatattgcttgcacttctgtgctgccagctgcaatgctttttcctcatttgctttaaatacatccagatcacccatactctgacacgtttcgatgccgagataatttaagttcccgtttgtgtctccgcagtgccaagcgcaattccagtcatcctctgcctgcaagattccatcctgcgctacataatagtgcgcaaatccgttttccagaggatgtgtctgtaaccaatttctataaaattctgcattggcgttcttgcttccagcgtcattgtggaaaaaaattcctaccggatttcttcctctgtttcctgctactccacgacaaatactcatgtttttctctccttcccgtgcgatgacgcacaataaaagaggacgattactcgccctcctgctcccgtgatttatttgttaaaacatccagtgctttttttaacgcttccggatatttcacacccataattccaacattttccaaaatcgagataccctcatttgctataaatgccagtactacggctgtgcggatgtagtctacgccgagagtgacatccagccgatatgcaataagtacgatcagtagggataccccttttctgcacagacctttccatgcagagtagctgctcagtgccccgttctctgatttgttgctctttttccaaaaggcagcgatcagaagtccgagaacaaagtctgctcccataaaaataagtaatgtagtcaaatcctcggaccatcctccaatcagatttacaaatcctccaacaatggctccaaacaccatgcataaaaacgcttttacatttgccaactgttccattttcttcatatcctcactttcctttctggttttaagtataaaaataagaccaacacggtcttgccctaatctccatataatctccttagtcgtccgtaacccaagtgatcgacaaaagtcgctctgtccaattcgggttctcaacgaaaattgtaattcccccatcactgccaattatataccgtccagcgccaaacactgacgatccggacacttcgatatacggcgcataaacatcaaacaccgggcgatacccgtctgggattctcacttcatcgaatgccccgtgtcttccgctgcttggaaactgggaaagcattgtgattttgcatgcaaccagacatcctcttctttttaattccacacggatgttatttgccgagtttgcacttgtatatggacctttcacggtaccggaatcgtaagagatagattttgtaagctgcttaattgtcctaataagccatatgctatctccatttatgtttgtcaccgaaaagtcacgcatctcctcatctccgcgaatagagcataccatagatccattcgcgatatcatctgccatgctactgccgccggaataaaattctaatccagagtagtttaatcgactcccccagtacctagccgctgtaaacgatcttaccatgtcaatattctctttttttacaaaaacggaaattgtaccgtcactgcttttagacacgatctctccggtgtctacatttatgtaaaagtgtccacccttactcttaataagtccggctgttacagttccaaggttggcaacgatcgcactgagcgtttgcacgtccagattctcgactgcgatataatggatcacccacctacttccatcccaccgcttgatcggctgaccggatgccgtttgccataactggccaactttaggatttgatggagccgtagaagatacaattatgccacttggtcctgttgctcctgtagcaccggtcgctcccttatcaccatatgctccgatgatacatggtgctgattgatacgtgctgccatttgtataggtaacaacttcataattccacagatatttttttgacgccgttattgcttgtacagttgtagtccatcctgatgtggacgccgacacaccgcttccgcttgccgttgcaagataataattcgtgatagactttattccgtttccagttgctccttgcggccccgttgcgccagttgccccttgcggtcctttcgagcctgtcgctccttgtggcccctggggacctgttgcacctgcatttccttgaggtccttgcggaccagtagctcctgttgttcctttgtctccgtatatcccgattatttttggcgtagtggtcgctgtggtattatctgtaaacgtaaatttttcatagttccacaagtatttatttgttgctgtcatcgtcggaactgatgtactccaaccgcttgacgctgttgtaattcctgtttttgcggaagaaatcaaataatattctgtaatggtttttatccctcttcctgatgtccccgccggcccttgtggtcccgttgctccttgtggtcctgtagcaccttgttctcctttaatcttcgcccacttataagatccaacacttgcaggatcggactgattgtaatccacacaagtaccgatatgcgttcccacatcttctccgctgtttccggtaaacgtttttcctccatcattggaatatttaatgtgcagataacttgtcttgccgtttgtgccgtttgttcccggaattccctgcgttccctggggaccctgggctccttggaaacgtgaccaggtatatttctttggatccgtgctatcttcccgtgtgaagtctacgtaagtaccaatatatgtgttaggtatctctgtcatctggttagaggtggttggattcgatactgcggaatacttgatgtgaaaataggtgctcttccctttaatattggttccgcttggtacaggtctgctatctaagacaggtgctgtctgcttataatttccattctgccatgtatatcctgttggcttaggcgtccagttgaccacaaaatcagtctttacaaaatatttaccgccacctcttaaatataatacagggattgatccataagtcagttgtgtatagctggcaggcgacactgaacagaatgaatacgtgtctgcataaataatacattcgccagaagtagttccccacccagatccaatggaagccagatctaaattcaccgagaatccgctaacatgtgtactccaggatggttttgttccactatttaaagacacattaaccaaaatacgattataaacactcgttggaagctgactccccacaacgggataccatttatttacatcgtaagttttagtatcagataagtctatcgttgctgatgatctccagtagtttacacctgcagctccagtatctcctttgggaccctgtatcccttgttcacctttgggaccttgcactccttgcagaccgggaactccctgcggaccttgttccccctgttcgccttttatttttgtccatgcgtatttcgtcgggtctgtagaatcctcttgcgtaaaatctgtatactgtccaatataaaacttcccagtgctgttcgaaacatcaaaccctgtctttccatcagcactgtttgcataggcgatatgtaaataacttgttttcccatctgcaccattcttaccagcaattccctgatctccttttacgccttgcgatcctttaaactgcgaccaggtatatcttgcaggatctgtagaatcttcctgtacaaagtccacataagttccaatataagcagacggcgtctctgtcatctgactgaacgttgtcggctttgccacagaagaatacttgatgtggaaataactggtctttccattcgcaccagctgttccaggaatcccctgttctcctttttctccttgcaatccttgtagcccacgttccccctgttcgccttttatttttgtccatgtatacttcgtagcatctgtactatctgcctgtgtataatctgtatactgcccgatatagagcttatttgtaccatccgtggtggaaaatcctgtctttccatcagcactgtttgcataggcgatatgtaaatacggggtctttccatcagctcccggctttccgggtgttccgtttgctccgtccgcacctttgatcttactccacgcgtattttttcgggtctgtgctgtcattttgcgtaaaatcaacgtacattccgacataatcccgattgctgtcggatacagaaaaatctttagacccgtctgcactgtttgcataagaaatgtgagtgtactgtgtttttccgtcaactccgtcttttcccgggattccttgatccccttttggaccctgtataccatccaatcccggagcgccttgtggaccaggaggtccctgttcgccttgctctcctttctcgccctgaggaccctgttccccgtcttttccatcctctccatccattacatccgtgattgtgacttcgtaatacccacgttttatcccattttctagagcctcaaatgagtacaccgcctttgtatccacgtcagcagcatttaccgtaacgctcttaccaacataaaactcatgtccatccttgctccatcggaattgtagcttgtctgccacatccacgccgttatcgtaagcgtaagctgtcagagtagtgctaccgatgccatttttaaagataatgccgttgtttgttgagatagagcaagtataaaccttatttttattaataaggtcttgcatcctctgtaataagctgtccgaaatttcggatgtaagctctttgtagtttgtaaataccgtctttgctgtttttggattggtaagactgcgcacctgttcggacactctcgcctgtagataaagtactggtgtccactcctgatcttgcatccttacagtgtctccgatgttggtgtcaaaatatccatccacctcgtaggtcactactggttcggatgctgttttaagatcagacagagccatgctatagagcttgtccttgctgtctgtatcgtactctttccgcattaggatataagcatcctctttatttacgatgttggatggaaacctgtctctcgcctgtggtgcccggatgatcgcaccgtctgtaaagtacacgatattgccgttctcatcgtactctttcttatccagtccattaatcgtcagcccgtccttaccggtaggctggatacaggtgtaaagcttctcggcatctgtggtttttcgaattccggtaattccttttccgtacctcagtacgatgtcattccggtattctccgattccgctgtccgctccggagtgttctcgatagacattcaggacgatctcttttaaggagtagtccttgtttaagactgtctcaaattcgatctccgcagaaaatatgttcgccaaggaaaacagcctctttaatacagacgttgtgcctgtccactcattggtgatccgcttatctgatacctcgttaagccccaatttcagtgttctttccgcgtcaaatatggcaaggtactcttcaaagctcatcgcctgtcctgccttgtattcccctgcatcctcgttgattagctcaaaagataacgaccacgccgtagctgtgatcgtctcttctgtctgctcagtgtttacgatgtttagatagtaggatttccctttgtgtataaacgccaccttattcccggcggtaacattctctgcatcctgatgctttgcggacaccgtaaaggtgtaagtattggccgcaccctgtaagtattcgtgcaattcgtctttccagtagtgcatagactttttgtgtgcgttgtccataaatgctactggtgtgttatttgcgctcagaatcgcaattctaatactgtccattacaagtaaacctcccgtattttcgctttaatatgcggcggtggagaagaaaaggaagaatagcagaactgcacttctgtaatccctggcggcactttaaaataatccgtccctgtaatctcatctcccttagccaccataccattaacgtagaccttcgtgctctccccgtctatagacaccacatccccagcgcgataccggttcggcacatcccgatatttttccacgttgtccttgcgaaaccagatgctttttaaatagttgtgcgtaacgtactggttcgacagatttcggtccccccactgtccaatccagatctggattttctcgcattccatatctttgatctctgggatagtaaagtggtaatacttcccgtaccagaaaatacgcaacttgtcaccctcttttaaaaagtcattgtgtccgccgcccatttttaaattaaacgggttatcctcgtaggctgtcggctggaaatccagtgtcttaattttcttgttttgaggggcaaaccagtcaacatgcgccgtattaccaaccgtatcactcttgttaatagacatagagcagatcacttcattttcccctgtaagaaacgcaatagtctgtgctcccgtctgtcccatcaaacctgtctcgaaccagtgctgcgtgtaacagtaaaagttcttcgctccacgtctgccctcactgtccaccgggatagtaagcgttttcattccaccattccagtatccggatgttgcttgtccaccttttagcgccatcacattgtatccagcaacattccgcacttccaacgctccctgtgtggtgttttctggattctgataagaggtaccatgatcgtcttgaaacaggctatacccctctgacagtatctctgacgccttatagtcttcgccgtctgcttcttcggtcttgccgagttgtattgcaccgtatttactggcaatcccgataaatccattttcatggttgtgagtgatatcgtagcttaccggaacggatcctgtaccaccgtttacaatagtaagcgtctgatatccgctttcctgatgagcggtaaacgatttttccgctgcagaatatttccgtggatcacaacaataaaaagtaaattcgctttttacgttcaatctgcctggctccacatctccgacacttgatttcgtcccgataaaatatttatccggttcatctgcaaaaatcagctttgcctgttccttatttaagattccagagagtttgttgaatttttcctggaactctctaggagatgcgcaaagcaactggtatccaactgtaatgcttctggttgtatctcgctttcccgtatactcggacccatccacaaggtcaatttctctctccgaaatttccgatcccaaaagctcacgaccggtcacgtacagagtccgatatccatcaattagattttcaatatatgccccatcaatctgcagagcctcactcggcagggaacttttgctccccgccttatttgtatccacaaactcatacatggcttcgttctcctttcagtctcagtttcatactctcacggctttccaactctttctgtgtaaattctgcagtaacacgtgctgcttctctgccgttatattcaaccggcacaacgattgtgtatgtcgcatttctcttataagtataatcatcagataattctttcttcgcacctactctgcttgtatatgccgtcatgactggatcagcactggaaataaccggaatatcaattctgtcatttatttcatcgaccattccataagctgagatcatcggagtattttctatttcacccgctataacacttcttgtttttggcaggctcgcccgggatgctgctgcagaatttgccgcgcccgtcatctgtgccgcaatcgcctgtattcttccaaggcttgcggctaatccatttgcaaagctaattccaatattcagaccactgctataggcgctgcccgcccctgacgcaagagatgcaagcacggaagaaaccatgctgattgcgattgcctgtgttggctggagtccgctttgtaccccatctttcgcgctgtctccgagtttctttccggaactcttagcttttcgcgcgccgttgtcaaatgcactcactatagatttcacggcacttttagccttgtttccaagagcatccaacccgtcattcacaatactcacagaatccttcatacttgtaatggatttctgcgctgtttttgcgttttttgcaatggacttcatgctggaatttactgccagtaacgcgactgccatcgccagcactccaacacacgctgctaccattgcgacaccgaatgcaactactccaactgtgactccaagcaccgcaacgcctactgcaagcaatccaacagcaaggacagcacagcccgcaccggccacgatcacaccggctccaaataccgtcattgcaacgcccaatgctccgattgctacagatgcctgtaagccatactcggcgacaatcggaagtacacttgccacgatcgcaaggcctgcgctcgcaagcaatactgccgctccaacaagtgccgcagccacaccgaatgcgatcaaaccaacagctcctgctgtaaggacaggagctactgcagccgctacgaccatcaatccaccaattgctacgatcaagccgaacatcactgcgattgcaagcgggcctgcatttgccagagaaattgcggacatagttaatacggcgattccggccgctgccaaaacaacagctgcgccgaatgcaacaaatccggctgcaccggaggataatgtcggagctaccatttttgcaacgatcaaaagacctgcaatcgctgctaccattccaactaaaaccgcaactgctaaaggacccgagtccgctactgcctttgccccctgggaaagtaggaaaaaccctgcactaatcagagcaactcctgcaccaagcatcataaatgctttggcagattccatagtgcttttcatgctttccctactcgacactccaacttctctctgtcccttggaaattccaaacaattttccggcaatcgcactaatccctacgccggcaagacctgcaatcgcactggtgaatgcgcctacaaacggggcaacactttttgcaatcttaaagcctttatatgcaacgacaagcttaggaatctgaggaatcactttcgcgatagtttcagaatgatcctctaaaaatccggcaaatgtttgcagagccccgctcgcggaatccattacaccggcgaaagaactaatgctttccgtggatccaaacgcaccggtgatctttccgagatcttcgccgattgctgaaaacgcatccccgaaagctgtttttacctcagaggcctctgtttttaaaacattccagtacccacttgctttatcgaaaaatccagttaatttccctgcgattgcatccccatcaagatctcctattttatttattatcccatctagggacttgatcgctcgaccggatagaacatcaaatgacggtgccagcttattgcttactgtttcggtcagaccatccattgcctgatctacagtcttatactctgtagcaagcttcgtaaatgcgtcatttgtgccgacttttgcgatagcatcaaagaaatcttctgtcgcgatttttccgtcctgcacattctgcaccagatccgtggtagtcatgcccatttcttttgcgactgccgatataccagccggagtctgttcgatcataagtttaaagtctgcccaagcaactgttggtttcgctgccatctgtgtagcttgctggcttaaagttttcattgcctgttttggattctcagctgccgccgcaagccctccgaatccctttacaagcttgttcgtgcttttaatacctactgcactcagctgagcgtaagtactcgccatatcagatgcgctgtaaattgtatcttctgcaaactcttgcaattccttttttacagatgcaatctcgtcagcgcctttgccaaccatcgacatgtttccgttaaatgttttccatgcagcactggaagaatttaattccgacaccataccgccaatactggatgtgacagcaccaaatgccttttgcccaattccggccatgattccaaatccgattccacttgtgagcgtgctttttaaattgcttacggtacccattgcagatttgaaagcagacgtaaatcctctatcctgcgcagataatattgcctttacggaaaaactttctgccatgccatcactctcctttcatcattctgccgattatgtccaatctttcatttttttgctttcggttcctcacacgatctacttctttttcgtaatcaaaaaactttctgaatctctgataaactggtttagtcttattctttccgacctttttctctgctttcacagcaaaattcaggaacgcttgcagatgatttcgatagtccttatctacttctcttagctgcacagcctccatgagcagggtgtattctggaattgtcaacctatccacttcttcaaagctcttaaagccaagatgtcggaaacaattcaacgccacctctctgtaggattcttcaaaatctacatcatcaactctctcttcttcgcttcttcctcttccattctctgtttctctttctccacagcgtccacgatctcgtccgtagcttttttcgtagcattggcactcttcaagaaacccattactgtttctgtaagttcatcaatatctgtgtcctcatcgtcgatatactcatccaaaaggcctcttgtcgctctcggattctgccctttattcgcaacatcaagaatgtttaccaacgcatccggatcaccatttattaagttcataagcgcataccggaatcctacgtctttttttactcccggcaatccatccacaggcatatttgtctgcttgttgatttctctcaaaaatcccattccgaatttaaactggtacacctgtccgttaattgttaattccatcatattttttacctccattaaaagagagcggttttaccgccccctatgtacataatcatccgtttttcgccttacaaattctccctctgctaatcaaggcagtatcaccagagggggttacgattcctgtgtcgtatccttaaacacataagctgctacttcctgctgctgtgcagttacagtaacatcccctcgttttccggagccgttaacaccaaaagtaagagacacctctacattttcatctgccgaggatgtgatctcaaattccgtgagatatccctggaaatacatgcccttaaacttattcggaccaggttctgccggatcctcaaggtttgcttcccagatttcaagcaactcatccgaatccattgcgtcctctaactcagagattaacttatctttcttcgcaaggatagcagtggccgtgatttctgtttccgcagccccgggtgtacggatggctccgtcctttgtggcagtggaatctgcgtccttgctttttgttcttccattttctgttgtgaatgcaagatttttcgcagccccttctttggcttttcctgcaagtcgatacaaatagacgattttcttgccaggtaccgcctctgcaaataactgtagtcctgtcttaaacatgctttttctcctctctaactaaaactaaattctatttccagcaacccgtgtaaaagagggtgctttgttgttgtatccggaagaattctctgatttacattccggacatcccatgcaaaattttcggtatgatccagttttctgcatgtggttttgatcgccaacagcatttttgataccgttcctctctgtcttggattgttgtgccagacatgaatggtctgatacacattgccaaacacagccgttttattggcatcgtctgtctgttggctatctgcaagataaacaaaaggatacggcgtaccatccggcggtaagaagccgtcatatacgtcatatcctaatgctttgatctctgtaagtaattttgtaaataattcttgctgtggatccatatctcacctcacaagcttttgcaaatctttttcaaactgtttcttttgctcctcaaatgcgggttttaaatagggttgggcttccataaagcgagttccgagttctacataaggcgcatactcagctgttggttcgacagtggcggtcatcccaccatcagagatgtcaataccgatacttcttttcagtgttccagtgtcaaccggtgcgttcctctgcgcttctctttgcatatcagagccgttcctttttacaacagtcttcactgcgctcatatccattctctttttcaagcctttattcagctttgcaattccctcaaatttaatttctgccactttgcacctcacttactacaaacacatgctttgttcgcagttttcgttcaaaatccactctgtatactttccttccaacacggatcctgtggaatgtttctgtataatgagtctgcaattgaattgtaagacttccttgtttaatgctgccataaatcaggttcatcgtttctgttccggtatctgaaacgcttccgtacttcttcacttctgtcacgtggtcatctgcgtaatcaccagtatctggattatacgctccatgttctaccgcctgaaaatatacagctttatcatatctcataggaatcgcaccctcccacgttttaccccgtctacagagtcaagatacgcttgtatctcgtccatataggcggaaaaatcattttcattgtacgtagtactttctccagccacgctatgtgaggacatgccctctgagccaatgcggttaaacctgatcactgccacatccgtaacgatatgctgcatactcgatggcacttccatgccaccaagaagcagtttcaaacgatttcgcacagattccagaatcagtaaaagcttttcatcggaatccctatcggaaacatcaattcccagaagaatttttaaatcatccaacattcaatttcaactccttacgaattcgccataatcccctgttttttcatctccgcaagaatcgcattgattttgtttttcaggtcagtcgctgtttctgtcgacaaatctgcgatcaaagccatctgtttcacaccacccagcgttgttttgttcgccgcaggaagattgtatttattcgcctgttctgcaattccgtccagtttcgctttatcttccttagacatcaaaccatctttagatccagcaactgctttcactattttcccttctaattcagtgatctttccgtcctgctgtgtatttttcgtgtcatttgcagctacaccattctcgatgttatccattgatgcttccgtgattgtctctccatctacccaatcttttttagaatacgccatatctactacctccgttatattatttcgcttttcctacttttgcctttccgatcttcccactgccaatcaaggcggtattgtcagtgggtactaccccaccgacactttaactacagctttcttgttgtcattcggaataaattctccagccttaccagctccctgcagagctactccgtcaaagtcttccgattcaatcgttctcgctgtgttaattccagtaaatgcttttgcaactccggcaatatatgcataggcgcattctttagactggaataattcatccggaatctcctctacaaggaatcccttgaacttcacaacttcattgccatcaatgtttacagtagagtttttagcagttgtattcaaaggatgatccgaaacggcattgtacagatcggagcaaaccttaatttttttcgttccaactgcttcgatgttgttaaaatacttagacagctcattaaacagctttaatacattgtcttctgtataatcagtaacacttaaagtttttccggcagatgtggaaataaattttccgtgctgcttgttaaactgctttgtcttagccctcgcctgcagttccaagcgatctgctaccgcaacgtcaaaatcattgtttaccgtgtgtcggtcaattccctcgtggtaattccatccccaagagtaattaaccggcgtgttcgcgtagataatctcttttctctccccgaaacggctagagttccctgttcccgttccaaacgctttcgtagctgttttatcgtacccagttccaaccacaaccggaatgtctgatgtttttacataaaaggctgtttcattttctctgactccatccagtacctcaagttcgccgacgaaaaaatccgcgaaataagacatctttttaaatactacctccaaaaggcttttaaactcaagctggtagcttcttaccggcatatcattgttgtctcctgtcgcaaataattgtaacatcataaattctttattcttcatcttcacattctcctttatttatactttgcaagtctcttttcgaattcagacattggacttcctgagttcgtcatggtttttggtgtggttccggttgctctagcaatctcggctttcttaagctgggattccacgatttttacaagcttatcaatttttgcattcgtatcatcagcatcattccctacaacaaaatcaagaacatcctgcgttgcttcaattcctttttctgtaagaatgcctgtggcgcttctgctaagctcaacctttgcagcctcctgcttcagtttttcattctctttttgcaacttctcgatctcgtaattctgtttctgctcagcattcatttttgccagtttttctgcctcttccttagcactctttaccgcctgttcctgctcagttttccattttgcgaatcttttgtttacaatcgcatccacatccttgtctgtgtactttttttcttccccgctatcatcagatgtgttttccggattaacactatctttcaccgcatcaagttctgctgtgtgatctacggtttcttctgcaaataactgcagcattctaaacatcctgctcttcattttctttacctcctaaaagtttaatgacattcttcatggtcctttcccctagctttttacgccttcaagacttgggcgtgaattacataattgctacataattcggaaactcatcggcaatcaagcgaatgccaacgaaaaaggaatccaccagaatttttgatttctctgacagattcctgtattctatctcagcctttccgggagatattctgtattctatttcatcatccgttaagtcatcaatcgactggatcagcgtctgcgtaagcgccgtaacgccagcacaaacaatgtcttttccaggttctgcgtacccggcgtgtccagagatttcgattcgctctggtcgaattcttgcttcaatcaaattacatcacctccaaaatgggtataaaaataccaccagccaactcagccgatggtattacattacatcaatttctacctcttttactagatcgtttaatgactttccactataaaatttatcattcataacttcatccacattatcatactctttcacgtcatctccatgccatacttgatatgtcggaacataattatgaacttcaactgtcactcctgatggcaatcctctgtaagagaaagaaatatcattgcaacactcagataaaatttgtcttacttcatctttattcataatatatcgccattttcctttctttcctcttcacttaattcgcgagttgtcttattcttcaatcttccatcatctccccatgtataatcatgtacatgctccccgtttttcccgtaagggtgctgctttggattcccatgatcggttgtgtggatatctttagattttaattttgactctccgtaaaaagctcttacatctactttcccatcttttccaatgtgatctattaccattcttgcctctgccatcttaggagtgccggaatgtccgctgacagttttatctgcctttattatatcaaacgtagatttcttttcaaccctcttcttccaagtttcaaaatccattccatgttcggaatatccatccagccattctcgatactctttatcatccatatatgctgctgtactgcaatgacaattaggatgcattggatgcgcattttctcccggcatcattttcgataccttaaaatgctttccgtctaaagcccggcagatcgggcaagcagtcggctccgcgataaactcatactcttcaaatccattgcggatataagactgtttctgcgcttctgcctgcacccttgacagttccgttatcatcagtcgctccgcattttccctgcttactccaaacagtttggtaaggtgccttgcaagtattcttggattcttgccttgtatcagacctgtttgtaagagcttcgccagttctgctttcatcatatcctgatacatccaaatacggtccgagtattttgcattgtggaaagaagcattcacgatcgaatgtgccatcttcgcattgttctgaatggattttccaagaattccagcctgcctttcaaattcttccagtgttttcttcgtcaggatctgctcaaaatacttctgaagctcatcaaacccgccgacaagattcattccgatattggctttcagcatttccaaccggttaatcttcatagctgcgttatagagtcgcatctcttcattggcttccttcgaaaaatccttatcctttacatactgctccgccttccggctgtacgcatcaatgtccattttggatacccgcttcttcgcttctgcaattgtgattccctctgcttttgcatattttgtatagaatccatttatttctttttgaatctcatccatcatgttcgcatagatcttctcaatctctttcgcgtattcagcttcatccctaatattcttcttccgctgctcttcttccctattcttccagtacgtcctgctgctcatctgccgcacctccgaacatccgcttctctacgattgtttcctgcttcttttcttcctctttctccattcgatctatttcctcagtaacgtccttaacgatcgagaggacctgcagctgcgtttccttggacacgatactttcaagcgcctgtgctgtctgcgcttcctccaagagattcttcgggatattcctactcattgtaaaatcaatatctttccatgcgtcccgatctgacacattcgttgcaagagagcaaaacagcttataccgctttctcatggatttttcaactttacggtcgaacgtcaacgcaagattgctcatagactgcagtttatacgcaagggaagttccagaagcatttccaaaagattcatcactgatgttcgctaccatgcttgtctgataaatcaaatcctcaagccgattcaaaagattttcctgtgttccgtctgccgtaggcttgccaagaaactgaacgataatatcttttgcgttgtctgtaccataaaggtttataatccggttgtcgcgaattttgtaaacgccttcctcgtccagttcggcgcccagcactgcaagatacgcttctgcgaaagaatctacatcgttcgccttttctccgatcactcggttgtatgtttctaccatgccggcaacttcttcatacagaccgattctctcatcgttcagcacgtattccacgcaattgatgcgcccataagggttcagcacgccctcctgcatcttttctccctcaaatgggatgatttctgtccttgtaagtatctcaccgtactttgtgacattatcgtccttttttccatatctcaccgcaaatagagcgcggctctttacggtatcatcgtagacaacaaacagttcttttggattgcagactactgtctttgtctttgcttcttcatcctggtaaaaatactcaaaagcatgtccgtagatgcagcacttcttcgccagctcgtattcttgatctgagatatcgttatcccggtcaaattcaaggatcgcatcttttattttttcgtctgggtgcgattttttaaccggaatcccgtaagcatatcccaaaaatgtctctgtgatataccttgggaaattcactgccagtcggttatccggcttccatgactccttttccggaagacggaatacatcatggaatcctttgtatagattctcaaggtatctgtaccttggtattcgctcttcatgcttgcgaatatactcatctactaatgtcatattgatttctttatcagcggaacataaaagcggttccggcagtttgtatggtcttttcccattcattttatattcctcctctaaaggtctttaacttcaccttaccttttctctcctgctcaattgagtaccttagcatcgccatcgcatcatcaaagaaattcaccggttcatccgtgaatgtgttcgttttctcatcctttttccatttccactgctggatctccttaattgtgtttgtacaggatggatgaatgtggatcgtgtgctgctttaagtagtcaatctgcgctttcacactgtttggctctttcttgaccggacatgctctgtatccagctttctgccacatcttaatcctgtctggctcagcagaatcgcaatacatggtaattcgcttctggaattttccctcgcccagctgtatgatctctgatgtatctctttcaaatacatacaattcccggcataagtagatatctccatccttgaatccaacctccccgatacagttcgcatggttgaatccaaagtcctgtgaatttaccatgtaatcgaatctttctggggatgtatcgaattcctcaaccacataattcgtaaggataagacctccggtctctccccattcaccaagtccgtaaatccgatatccatccggatcccgttctttacgcatcatcatgcgccggtgatacgcttcatctatgaaccggttctgcaggtacgtagactggtgtgtgtatacatcatcactttttatgtcgaaatactttgcttttagccagtgcgttgctgacactgggttgaagctgaatgtgatctggtaatacaaaaatggattgaatgacaagtcacctctgagtcggtcatcgagaatatcgacatccgcttcgtaaagctccgttgcttcttcaatccatatccatgttaattttccgacatcaaatgtgatagactttactttttctcgctgtccatcatctttcattcctcggaaaatcactttattcccagttactttcgagatcagctccattggattacttctgatctgccagaataatcccgctttatctccgtatatcttataaatcgcactcttcaactccgcataggtactatccttgtttgttgtgtctactttccggacacacagaagatttgcgcctttatactttggatcaccaagtttgatgataaaattctgtgcaatgttcactgacttcccggatccggcagaacctttcgccagtcggtatcgtttcttgcactcattgaactctttaaaatttttgttaaatcctacattaacttgtttcatcaccatcaccgtaatctaccacaatcttcatgtccatatctcctgccacatctagcttgtcattccacatacctaaatgtctgccaagaagctcgagcgccttcaccttgtcgcatggtttctgttctaatccatcacgccccttcttaattgttcctagggctcgctgctgttcttctgtaagattctctgtaagctccagctccacagtccgatacagaatcggtgctccgtcttctcctacaagtggaacaatgttcccattcacctctgcggttgcctgtttctccactactttcgcataatcagaagccttggaaaaagcaattgcggccagttcatttaaaacccgatcctgcgtgatctccgtccgcttctgccgctcttccattctttcggcaatatattctgcaaccttagcatttcttagcaacttacttccatttactgctgctgactcttctttctttacgcttggatatgcgacgcggtaagcccgtgtggcatttagatcaatcaagtactcatctgcaaatattttctgtttttctgtcataggactcaccaccttccattctgttctattctgcataaaaataactatacaccttaatctataggcatatagttatcgtcaattcatgtcgttataatgttatcttcatcattccgcaataatcctcaaatgggaattttatattatactccttggcaattttcattgctcttcgaataatattttccttctccttattcgaatatccatttagtttaaccacttcatttagatatattgccgtcataagtacggcaaatgcgtctgcgtctatctcagatatctgcgacctatattcttctaggctcactattccaacttctttatactttgaataataaaaatcagaatccgttacccattgccatttatgtctgacttcatgagcaatgtcataatacgcatctctagttcttgcttccacgcctatataaacagtgtcagtttcaggatcgtaccatgaactcccatagcctccgtgttctttgtaccttatacttggggtagtaatgtgtaaaaatttcgaaacttctcttgcgaattccaccaatttctcaacttgttctttctcttccatgcgtttttcctcctcatcctgcgcctaacaattaccacgcatatattttacaatgccccctattctctttcaagcaaaagtacccatcaactggatgctaagaatttaggattactgctatgaaaattacaaacgccaacaaaaaccaaaataaccaagtacacaatcaaaatttataagaaaaggggaacttgcagtagtccacaacgggtatagcaggattcgaacctgcgacacatcggttaacagccgatcgctctcccaactgagctatacacccgtaggatgccttttattgacatcctttaccctatccgcactcgggcactgacacaaaatatagattgctgaatctatttgtttgttttgcagatctgcggatatctgcgttttggtaccattgcaatgtaagtccggtgtgcactcccagaacagacctcagctgtgcagcctgcatcttacatcacaaagccgtgtgcaggggtcgaacctgcttgtcccaactgaccacggcataaaaacaccgccagacgagaaagggtgaaagtccggcggtgccttgaatgtaattggaaagaaagttaattgctagagcttaacttttaactccatgttatactatatattatttaaaacgaacaatgtgaacaaaacgaacaaacttttatttttctttcatccacctctgaaattccattcttgcactatctcctgtgcaatttcccttcattttcgcagccacttcatcccacgtcagtccttgcatgaccctgaaccggataatcctctgcatccttaccggagctttattgattactcgctctgcttttactttaatccgctttgcgttcagctttcgttcttccaacaaccgttcctcttcgtctatattcaccgtgttctctatacatccagagatattaaagctctgtggctgatacggaaactctggattgctgcctgtcaccttgtcctgtacgatcgtctttcttctgtgccgcctgatatcttcctctgtctcttttaccaattcttttgcatctatgtactcataaatcacgttcttgtccaactctatcacctcccggaacaggatcttttatgttgtatttctctgctatgtactccacagcgtccttattcgccatctcacggcttttaaagtcgcacttaaaggcttcatgctcctgttgctttaaagcggtctcacagggctttctcgttgccatatcatgtgcatctatctttcggatgactcctgccgtctccttcctgcgtctcatggtttccctgttcattccgttacctcaatctcttttcctgtcagctcttcaagcttctgtcgcatttcttccacagtcattttctttggttctttgcgctcccagatgagttcaagattgtggtcttccatgatactgctaatttttcccatgcatttaatcttatatactctaactatttccaaatcgcttaccacactttttaagttttcgttatagtctcccaaatccgcatatccatcttcgccagtcaaaaagccgcctataacaagtcttttcctgaaatagttatcattatattcgaccaccattccgtcttttaaatccgcctttgtaaattctttctgcatgtaatcactccattctaagatttcatacccattgcttttatagtactgatacggcgaaaactctcctttgatataacatatttcttcttcgcagaattcgtaatttgtctctttcaggtagctttcgcctgaacaccacttcattccttgcttatgcattctttcgcaaaagtctttcgcttcctcttctgtcttgcagtgcactgcaatcttattgtctttatttttaaattcattccaattaaattttttcatattttcttacctcactatcttccgcacaatccaatctaaaaaaatcacaaacaacagtatcgggaagcgtgccgctgctaaataatcctcacactccaactccacatcttcttccaatcctgcctttaaagtaatcactgttccaagccccaggatgtaatacagggctaggaatgcgattgtgattatgatgtccatgttatttctccttgtatggttctatctgttctttcggcatccacgctgtcacgacatcgtacactatttccttatctgtcccaaattctttgtcgcaagcgtagaccgaacctccatcatcacaaaatttccacatacccactctatctatgtatccgtcgtacacattgcgctcttccggatggtatgtcttttcttcttctgggacccagtatgaataatagtctccaatccattcagatgagtgtacagtaacttttaccatttttccgacttccggcaatttctcgcttaccggaatccaaccgtcatttttcttcccatcttcatatccttgcatataaaattttcttcggctgcattctctgcacttcggaacatcgcccatatgagaacggataatgtcttttgcccaaccaacacttacataatcatcacacattccgaatgattcaaactctatcgcatgatcttcaatctcttccaagatcttctctagtacgttcattccacattctccttacccacatatttctccacaatatctactgcacaggtcaagccataaagatagcttttcagctcttctgctgttttgctcgctccatgtcttttcttttcttccttcagtgtttcgtaggcatcatttttcatgttttcgatttcttccacgattttctctaatgtgttcatactttatctctcgctttccagcgcttctttcaccactctttccacttcttccgtttctttttcccatgattccgcacatctttttacaccttccgcgtaagctgtaagacccattgctaagtgttcttccgcacttgcatttgtccaagttctgcattctccatttttgcgcaatatagttatcattattttcttcattccatcacctcaatttcctctcctgtcagctctttcttctgtatctacttcaatacagtgtaaataagttactttttcctcataatcaaatttcatattcgcacctccaatcaaaacgcatatgctatccaaaaatattgcgtactcccttcaatcggatagtaatatattccatcgccggaatcttcgccgcgcatccactggtcgcaatattctccattgaactgctcttcgccattaggttcttgagacacaccaaatccatttatccaaaaatcctcaaagccatttgcattagcaaattcttccaattcttcataaagtgtatctatttctttttttaactcctcatatctttctgctttacttgctatttctttaggtgctttcattttctattacctttccgctccccacgatcactcgcagggaacttgaatattattccgaccaatcaagtaactgactgcaatctacatttggacatctttttaaaaatgttggatgcatataatatccatctcccaaagactcagataattcagttccacaagaaggacatctggcaggactccactctttaacttccactttttggggtagctgcttttctagtgcttcgattgctgtgcaataaacttcaatatcactttccaaataactgttatcttgtttctggaaaaatgctttattgcgccttatcatttctctttccgcattaatcccaacttgaaaccttcctattgcttctctaactttcttctcatccatctaattttcctcccgttatttccaaccataaaccactctctccatctttttcgtagagaaaatctgtctctatcccgcagaccgccaactcattcattgtcctcacgcaatcctctgcatcagcgcatttgatcgtgtcgccttttcgcaagcgtgtttctttcacttttggcattagtcattcctccgtatcgtcatctcgattccaatctcatctttaatcatctttgtgtattcgtcccatgttgccatatcatccaccagacactctgctttcaggttcatccggtcgataaatctcttgcaccgtttcccggcaaagccgaactcatcatgcagcgttgcaactgcgatcaccatcattgtgtccagtgtcatgtttttgattttctcacaggcaatgtttagttcttttctggttaatgctgtatttattcctgtgatattccggaactggatttctttttccagtccatcgataccgtctttttttacaatctcccttgctagaatcaatccctgtgatctgccagctgtataatcatcaacttttcccattcttttctctcctgttccatattttcctaaaacattcagtatgaaaaaaaacatccgttgccctctttgtcctcacatactggatacgactcatatcatccgattccctgatggcctgtccgcatcccgggcataacacctcgctgaaatgtttatttaacgccttgttctttgcctgatctgtcaatacccttgttctcctttatcgctttaatccttgccttcagactggccattacccagccttgcacatcatcctttttactaagcgctttcatcacatcttcatctctggtctccgtacagaccaggtgatgtatgatcactttctccgtctgcccctgtcggtgtagtcttttatttgcctgcgtatacagttcataattccacgtcaagccgaaccagatcacgtgatttcccccctgctgcagattcaatccgtaagcgctgctggctggatgggtaagcagtaggtcaatctttcctgcattccaatcatcctcgtcctgcgtcgtcttaagctcacggatccgcaattttgatttttccagtgctttcagaatcctgatcttatcatgctggaaattataaaacaccagtgccggtttcccctgaagggactcgatcagttccaggaatgcttcgatcttacagttatgtatttcatgatagttccggtcttcatcataaattgccccgttcccaagctgtaacagcttattactcaatgctgctgcacttgtgacactgatttcttcttcatcctccggcaactccagcaccatcttgtactctaattccgtataggccttccttgacttgctgtcaagttccaccgggatctcatgatatgtgatatccggaagttgcaggtagtcctctgccttcatgctgatacagatatctgagatcttctgtaggatactttcttcggttcccggtttcgccttatagttgtatatcacattctgtccccggtctcccggatcaaaataacgttcccggaatccagtgtatctcttgcccagacgttccccctcatccaaaagatagacctgcgcccaaagatcctccagtccatttggagaaggagttcctgtcagctctaccatcctttcaatccgggatcccacacttgccaatgctttgaatcgttttgccttatggcttttaaaactgctggattcatcgatcactaccatgtcaaacggccaggcattgcgataataatccaccagccacaccacattctcccgattgatgacgtacagatcggcgggcgtattaagggcacgtatcctttttgcttcgcttccaagtatttgggatacccgcatcatccgcgtatgctcccatttatccttttccttcgtccaggttccctctgcgacttttttcggtgcgatcaccaaaattttttgtacttcaaaccggttgtattttaattcctttaccgctgtcaatgttgtgattgttttccctaaacccatatccaaaaaaagcccgatttttttaatctccagtatcttatcgatacagtacttctggtattcgtggggaatgaacttctttgcatcacagcccatatctctgcaccaactttctgcttgtttcctcaaacccgtgaccttgaaagaactggcagactccggagatgccgtatatcacatgtacccgttgacctaagtctgataatctctttaactggactctctggacagatgacacctttccagaatccgttttcaactctgtgaagatcggcatctgtcccggaaagatgatgatccggtccggtactcctgtgttccctgggcttacccacttataagctctacctcccagtttttttacctcttgtactaggattttttcaatttctttttctaacattctcctacctcctgacaacaacaagccctatacgcgtatatgtatacgcgcgtatgccgtttatggcatattatggtgtatatatatatatatctttaattatatttttttattttttataaaaagtttgttcacattgttcacatatatctacaaacagcgtatatactgggttttctatgtgaacaagatagcaacaacaccgtgaacacgtaaacaaacctcaaaaatcagcatttttgtactttgttcacggaagtgggtaatgttcacgcttaccaagattactttgttcacaccctttcgaaccccctttgtgtcccgtaaaacccgtatctttgagttgctttgttcctcttccatccgcttatacaagatagaatgttgttgatttccatgctgtccctcttccccatgtatttgatatcggaaccaaagcactcctgccatatctctgcagcgcatacctttctccgatccatcagatcaacgttcgctgttaaatgcgtacccccttgcaggaactgccgcctctgcattagattcataccatcccagcccacggggattttccgttctaaaaattcccggatcactccttcctttgcaaaagattccctatgtttttcctgctgttcttctgccagtttttcaatttctttcggcagaaataaagactctcccagtacccagtacatgtacgtttccgcccaaatctgatccacttcttccggaagatccacccatacagatttctttgccttatactcccccacatccaccggccagaatcttctgttgcctgtggcatcttttaggaattcgctgtcatttgaagtaccaaaaaatacgcatctcctgggatacttatctgttgtacgcccatacgctgccctgtagatatcgtgtgtcttgcttaaaaactgtttgaccgcactggtttcctgcttggtcattgctgtcagttctcccacttcattgatccaggtaccctgtatcagttccgctgcttcttttccttcaaagcttgtcaaagaatccgaaaaccactgttttcctaaaattgcaaggaatgtacttttcccgattccctgcggtccggtaaagatcggcatataatcatatttcactcctccggttacagctcttgctactgcagcacataaagacttcctgatcaccgcccttgtataggtattgtcctctgcacccagataatccgacagcagcgtatccacacgctttttaccatcccatttcaaactctccagatagtcctccacctcgttaatctgattctggctgctcacgatcagcaggccgttatccagcttttcttttcccgtaagtccgtaaaatgtctccatatatcggtaataccctgcgtagtcaacatctttccaacggcgttttccctctctctgatcccatggcaatgcgcccagcaccattccacagcttgcaaattggtcgataacgatcttcccttttaagagcggatcattttccagtaccagtgttacatttgcaatcgttttttcgattttcccatttccatcttttgtaagattcagtacccagtctacattcccgtcctcttcccgtgccggactttccagaccagatactttttttgcccgttcaaacttctctttaataagaagagtagacacctctttgtccgctcgtgccatttttgccattgcttgaaaagacggaagctttacggatggggttccctcttttgcttctttatccaggtcgccatacatatgcagacggatcaggtcaaacgcattcaccaattgcccggaacacggatccgtagcatggtgggaatagaggaacagatcaccgtcatatagaatcgcacctcccgttgtggttcctcccgtataagtgtatctgtttggaatatccgtctgttcgtacattcccgggataaactgttccattgcctgtgtaatggaatacgtacggcagaatgctcctatgattccttttttctctgtcggattttcctgttttgccagacgtcttttttcaatggtttcacttccgggtacttgcggccattcggctacattcttccagttcttatacattcctaacagcccgtccagactgcagaacggatgatcatatacccgataaacatactccccgtccttacaacagcttggccagtacatcagccggcttgcgtcaaatgtagtcgggtcacagaactcgatcccaatcaatgcagccgcctttcttgctgcgggttcatattcgtccggagtagccgttctatccacaggaataatgacccggagcctcggggcgtatccggaatgtttccgcgtactataaacaactgttgcgcatcccagtccagatactctcttcaatatttcttctgtctgccctgccggtatattgtccatatccaatgtcagcagatctctcccctgcacgtaagccccttttcttctatcattgaaaaaggtaccgccgacaaaccctccaacatctttcaattcagcttgttggctctttgacaatgctaaataattttctaaggtttccagacttctggccggagttttcaaccggtcaacaaattccgaccacatgatctcacttttcggccagtatgtagcctttcttgatccggccatgctgaccaaaagttttctgttatattccacttcaactcctcctagtctttcatgtaatagtcactctcaaatccagcaccttttaagatcagtccaggtgcccaaggtatcggctctgccatcagatcacagatttcatccaccgtaattgatacaggggcatcgatgatcacctcatcatgtacatgaaacacgacctgcagccccatcctgtcaattctttttagagtctctgcaagacagtcacgtgcgattgcctgtacgatattctctgtcatctttcccccataagtggatgccacttcccattttcttgtctgttgcccgaccgtgtaatagtggattgccatcttcccaaactgattctcctgcagaaatggtttcgggtagaacagctttctcccgcttggaagctgcactgtcaaaaatgactgtccgtataccagatccccctcgtaccggaaaatcaaaccgtagataccctgtggctgtgccgtctgcatcgtagtaagggccgcctgctccactgcataccacaagtctctgatccgcggatttgcgctccgccatctctgtacaatatcgggaagttcctcttccgccagtcccatattcaatgctcccatggcaattaaggctgctgttccaccctgataccctaacgcaagcgtggcaacttttcctttctgccgcaggctgtattccggatttccttttgcaatcttttcaatcggaacatggaacatctgagatgctgttgcttcatagatctttccatgtgtagcaaatacttcatttacccactgttctcccgccagccacgcgatcacacgagcttcaatggcagaaaagtcagccacaacgaatttattcccatctgaggggatgaacgctgttctgatcagctgcgacagagtatccggaacattcccgtatagcagcttaatcccgtcatagtttttatcttttacaaggtttctggcataatccagggtctttaaataattcctcggaagattctgcaactgtacaagccttcctgcccaacgcccggtccgattcgcaccataaaactgtgtcagtccgcgtacacgatcatccgctccctttgcggtatccatggcaacatatttcttaatagatgttttccctaactgctgacgaatttccaaaatctttctcgcatcatccggaagatcttcccgctgtaagtattcttctactgttgctttttgcaggtttggaatatccacaccctttccggacaaccactgttgcaactgtgttgcgctattcgggttggaaagaccggtaatcctgaatgcttctgctgtcaggcactccgtgctatgagaatcaattgccaaagcccctgcgatcagatttgtatctacccgaactccatacgcattcatcaagatatccatcctccacaatctctgttcttctttcggaactggaaacgcctgcaacctttttaggatttcattctcagtgacaacgtcttgtttacaatattccctgaacagctcccacttttccggagcgtgcttcggaagattccagctcctgccgccgttactttttgtcggtttacaaggagtacaaaaatatcggatcaaagcctttcctgtggaaagcttctgcttatcctgcggaaggcctattgcctttcctgttgcatccaaccctgcagtgtacccgcaatacagtccatggatcatcgtacagttccactgttccaaaggagtacgataccctgcagtattcaaacagtaccactcaaatgccgcattatatgcgtgcttgaccacattaggattcataagagcggtcaaaatccgttctggaatacgttcttctacggtaagatctacaagctgtacatcctcttcatcatatttataggcaaacaaaagaatttcaaaatcttcggactgtgcatatctgtaagctcccgcttttgtgatgtccacactgctttttgtctcaatatctatagataaatggtgttgcataattacgtctcctgttaaaaggaggggctaaagcccctcttgattacatcggcatccctgtgatcggattgattgcctgtacattctgcggtgcgttcctgtactgtggtgttggattgactggctggggcattgcaccaaacgcctgtgccgctgtcggcgcacttcctcccagggattctccgtcttccaatttcatgaccggacccaggccacatccaattcctttctttcccccgaaagaatatggaaagaagttcacatttactctcgcataaatcccactgtaaatctcagactggttaataatcggattcatgtttacgtctaccacctccggtggataatctgcttttgcacttgccgtgaacacccagtgtcctttacattctgccccaaatggcatcccatctgacggacgcacaccatccccgtcatgaactggtgttgacaccacaggtgggcatacaccgttccatttttccgctgttcccctctgcttcgcggcttcaatagctgcattgatccggttcatagtatccacatcggatttcggcactaacacggtaacactgaatttttcttcctgtcccggtgtagccgcataaggtttaaataagtgtacataagataatcttgcttttcctgttgttacgtttgttaattcgttcatattagttttcctccttgaatgcctcttcggctgtcactttgtttgtaattgtttctcttttatctgactcttttgcaagtgtcggtttccctggcttcttcaccacaaactctccgactgcgtcctgaaaatctttcttccctatcagcttttctacctgcgccaaagtcagtggtttcttttcccacagcatcggctcttctgtaatcccactctttaaaagtttttcaaatgccgtatccatatctgtccagtctctggatcctcggccctctaccgctttccatccaggaatcttctttccggcaaggcattctgacaatgcaaactcctgcagatctttgagccatcttgcaacatcttctccctgttccaggtatcttccaacttcctcatttgtaatcaatggcggtttcttgtctgttgcaaaagccagcttcacattttcttctgcccttgccctgcactgggatttcgcacggcagaacctgcactgtttttccccgggaacaaactctccgtctcctttaaatgcaaccgcagccttttccttcacataatctccaaattccaaaagctgttccagactacatccccattcagagattccgtctggcagcctcggctgcacgatagcaagccggatctgtttaatcggataaaataacttacatgcgtcatatgcaccgagtgcatatagcatcatctgtggattttcctctgcggaaacaagaacacccttgccgtatttaaagtcgatcacaaacagggtttctccctgaatcatgatgcagtctgcagtaccgaacccctctggtacataggagtcgaaccggacttgtttttctacttccacatacggatctgttgggagcttaatggacacatcccgaatatagtcaatgtatgtgtccgtatgctccaacatttcgtcatcccacaacgggttctctttcatttttttgattgcaaaagtcagctttcttttagacacatcatgtggcttaaaatagttccttaccttcagctctgcaagttcatgcgccagtgtcccctcttttgcagcctcagaagcagtatccggaaattgttcctccaaccgtgcacttggggtacacgccagccatctgtgagccgaagatgcacttaacagagcatggtttctctcttcatgtgccatattagatctgagcccccatttcccgaatcgccgttgcaaagcttccgtactgttctgctggtagttccacaagagaggataccccgaaactctggatcagctgctgcagctgtgcctgcatccctttgtccattaaagacatggcagcttttgacagatcttcccttgtatacgtcggcgcagctataggaatcgacgggaccggcgtggtattctgaattacttgattctgctctggctgttttggctgtaccgatgtgttcgcctctggaaaatgcggtgcaatctgctgtccataggaaactgcttgttgaggctcaacgtccggaacggttttgctggctacaggggtttccatacccccctctttggataacagtttctctgaaaaagaaaccagttcctcataactatcaaatgtaagtgtaatctgtgccattttaaatacctcctgttttttctaagcctgcacgggctatttttatgaattcatcctctgtgaggctgattccttttgtcatttttgaatggtcttctgaccatccgcggatatccaacttgtcctctttcccaaaccagctgatgcggtttagctctatgtggtaaatatccgtttcgctcttttggggaagagcaagcatcgtttcttttatctcaaaatttctcgctgtcatttatctgttcctccaacaatctccgttacaccaaagatagtcatctgtgggtaaatactcttccaataccaatactcctggtttttcttcgcatatgtggtctccctctcctatcggacagagatttgcacaattatcacaagatctttccatttgcactttctcctaaaatctgttaatataaaattatagttgcttgagcgcttagagagaaccaaccccccggtccctctctgggtgttcttttttaatacccaaacaccagccaccagccgatcgccaccagcccgcccccgatcacagatgctgcgactttgttccagtagtgcttgtcctttgtttccggaagctcaaccgatacagaccggatatcccaaccgtttaatgcgttcggctgctgggtggtctggcagtgataagttcctttaatctccatgcttgtcctcccttctaccgcctaagcggtttttcttctttcgaatcctatatttttcattgtctcgtctaattttttctccaaaatctgagaaaattcttctttacttaagtcctcttggtttacccaggatccattaatcttgatcatgcttactacttcgattcctttcatttcaccacctctctactatgtatgaattattggttgtctgtgttacaatccatatgtgctgccatcgcaacctccatggcgggattgctttcttttggtttatctcctatactgtaattaccgagtgccagtcggaatattacgaaaggagaacaacaaaatgggaatatataaaactgctcaaatatgcttaaacggtcatgtgattacaacaaatatagaaaaccataaacaaccttactgctcaaaatgcggagctgagacaataacccattgtcaaaattgcggagagcatattcaaggcagatatttgatcgacggcgttctatctcttaataagtcgcaatacattacaccttcatactgtcactcatgcggtaatccgtatccgtggactgaaaagatcttgaacaacgctaccgaacttctatctcttgacgaagaacttgactctagtacaaaagaattgattaaaaatgcaattccgaatctattagttgatacgccagaaactcctattgttatcgggcacactataacaaactgatcttccacttttcaggcaaaataaaagaggtcttggcataaaggaatctgacgtattttccatcagattgttttatcctgagacctcttgtgttatcatatggttttgtaaccatgaaattaagaaagcagaaacctcccctaccaaagtttagtttctgccttcacctaaacatagctctcgctacattcatacatacctatgataacagttaaaacagaaaactacaaccttatttctcaggatttttacaataaaacaatggattcccttgatctgaaccttatttcatgtacctgtggacactccggctgtctcatccgtcatggctcttataaacgcagcatccagcttgctgacaggatcctatccctttccgttgtccgtgtgtactgcaaaatctgcggacatacccatgcattactactttcatccatggtcccgtattcccagatccccctggctctgcacgtccgtctgattcaggcttatgaacatgaaaccggattccggaacatactggaagaacaatacctcgtggatgaaaacaacctgaaatccatcatccggaactaccgcttacactggaagcagcggctgctctccatgaggcttcacctccccgatatccccagcctgatttcaggatgcttttccctcttttccagacagttcatgcagattaaatcaacctccaataaactttttatcctgccaacataaccttacacgacaggtctggttttatcccttatcctttagaaaaaggaggcagatgaaatctatgaaacaagaaaaacaacaggaaatcgcactaatgcgctatggcgccatcgcaccgatgattgcaggacttgatgaacgttatccaagcaagactgctttttacacagaaatctctgcaaaaggcctgatgggacccgacgggaagctccatcattatgctcccgccaccattgaaaagtggtatctagactatcagaaccatggttttgaaggtctcgtcccgaaagggcggtcagatgccggcatgagtcgcaagcttgatgaagaacttcaggagaggatccggtatttcaagaccaactacccccgcatgtctgcagccgctatttacaggcagctgaaatccgatggctccgtaataaacggacaggtatccgaatccaccgtcagccgttttgtgaaccggcttcagttagaacttcggcagaccccgaacagggatatgcgccgctatgaacgcccccatatcaatgaagtctggtgcggggacagcagcgtcggtccccgccttacagattcggatggcaaaaaacaccgggtctatatcattgccctgattgatgatgccagccgcttcattaccggaattgatgtgttctatcatgataactttatcaacctgatgtcggttatgaaatcagccatagcaaagtatgggcgcccaaaagttttcaactttgacaatggtaaatcttacaaaaacaggcagatggaactccttgccgcaagaatcggtacaacactcagttactgccagccatacactcccaccggaaaagccaagattgaacgctggttccggacgatgaaggatcagtggatggcagcccttgatatgcgggatttccattcactggaagaactaaggggaagtctgtacgcttttgtccaacaatacaaccaatctccccattcttccctccgtggacggtccccacaggaccgtttcttttcggaatcggagcagatccgcagactttctgaggaagacatccgtcaaaatttccttctggagcttgaacgccgggtatctgctgacagtgtaatcgtcatcgaccagattgaatacgaagttgattatcgttttgcacggcagcgtatccgcctgcgctattctccgaatatgaaagaaatcttcattgtggaagctgacgggacgctgacacccatccggcttctcaataaaaccgaaaacgcattgataaaaagagaaaaagtacgcttatgcaaaggagacgaatgattatggattacactgcaagatacggattggagttcaatcctttcctaaagaactcaaaggaagtcctcgtagaaacacaggaatacaaggaggttctgttccgcctgaactacctgcttaccacaaaaggcttcggtctcctgaccggaagcgccggaagaggaaagaccaccgccgtcaggaactgggcttcaggactgaacacttccctttataaagtggtttactccagtctttctaccctgactgtaaatgatttttaccggaatcttgccgctgaacttggagcccagcctgcattccgcaagaccgataacttcaagatcatccaggatgaaatcaaccgtctcgtacttgagaaacgacagacgcctgtcatcatcatagatgaagcgaactatatcggaaacgctgtactcaatgatttaaaaatgctgttcaactttgaaatggattccaaagaccgggctgttgttcttctttccggtctgccacagctcaacagcaccctgcgtctaagcatccacgaacctttccgccagagaattgtcatgaattataacctggaaggcatgacaaaagcagaagggcattcctatgttgctgccaaactgaatggcgccggatgcacacaaacggtattcgaagacaatgcactggaagcaatcctcaatgcagcgaatggaaccccacgtatgatcaacaaactgtgtaatgcaagtctgttggttggaaacagctcaaatttaaatatcataaccgccgatgccgtcatgcaggcgatcaatgactgtgaactgggatagctttagaaaccatcatgtaagataatctacatgatggttttttctcataaaataacgtgcctgaagcgtccaaaaatatatgcttcattccatcgttaggtgctccgaaagacccgttttaatctgacggaaaaggcagcgtttaatttgccgaataacacctatatccgttgcgaattaccgtaatggaatgagcaaggctggtcaaattgttaaggattctatgtttcagttactttcaaatgttttgagcgaaactatcaaaaacgttctttttcattaggacacccacaatattgacaatatttgtttgaactgtgtattaaatttttgcaccgagcgcaatgaatgaagttttcgtattttaataagtattcgttgcgctcttcttgcgtcattgttgtgccatcattcccttcatggccaatgttactcatcctctttacctcctcctactccaaaaaatactcaactgatacaccgaagtaatcggctacgcaacagattctaggtaagccagatccttcacggtttccagtctcttcttacaatcctgataaatctccttgtaatgctttccagtcagtattccagtgtcgatcacatggagaatgatgttttccatcaacgaaagattgttcagctgcataactgttgcttcatcacgttttccaattccagccatcttatttgcaagttttgaataggtcatgtaaagcatctctgcgtgtgtactcccctggccctttgcatatcccactaacttctgaatggtgtctgtctctgctcttctggtcagttttccggcttttcttgtttctacccatgtctgagttgtcttttctttgatgagtgcttccatctgattaaatgctttgatgtactgcaatttccattcaagagctttcttaccagtgaaacccattactaagagagagaaaccatctcggttcataatatactttggatagcgttgtccattctgtttttcaacgtaatgcgacttccaaaacattttttgggtctcctcaattttgagcataccccctaacagagtttcaattgtccttactacattgctgtgtctctttccaaacttctccgccacctgtaagctgtcacacactgcttcatcattttttaaatatacgagttctgtcattcgaccatcctttcaaagttcaatattttgaactttttctttaaaaaaatatttaggtatgtcttcctgtgccaaatctagaagttctactgctttacagatatctgtctgcttccacggtctctcactacttaatttcaagcaaagcgttctttctgaccattccatagcttctgcaaatctgtactgagttccgaacttctcaattattcgaccttttaatttgtcataattgaatgccattttatcctcctttcttgttcaaatatttgaaccatttgtatattagcacccttttcaaccattgtcaatacaaaagttaatttttttgaactttattgtttttcatattgaacttttgtttagtgtatggtatatttataatcagaaaggcggtacatttatatgaagaaagaaagcacttctactaggctaaaaaagattatggagacaaagggtcttagacaagtagacgttctgaaattaactgcaccatactgtgaacaatatgggataaaaatgaacaaatcagatataagtcaatactgttctggaaaaaatgaacctaatcaagaaaaactgttcgttttaggaaaagcattaaacgtaagcgagtcatggttgatgggatttgacgtaccgatgggacgtaacgactacgaatttaaagatgcgattggccctgataacctttcgtttaataatgttgaggaattcaagaaagcttacgatcaaagtatgttcaggaaaaacagattagaatataagcttttagagaacatgagaaagctaaataataatggaaagaaaagtcttttgaattattctgaaatattacttggaaatccgaattttatagaatccaacaatcatttagaagtattagcagctcatgaacgaactgacattaaagtaacagatgaaatgagaaaacacgataaagacatcatgatggatgactctgaatgggagtgatacaatgacgatttatgaagaacttttggaagaggctaatagtagcggactgattgtccgcgaaaagactctttccggtagtaacggattgatctataaaaatagaattgcaatatcaaacaggttgaaaacatccgcagaaaaggcttgcgtcttagctgaagaaatcggacatcaccatactgctgtcggtgatatctttgatctacaagatattgaaaatatgaagcaagaacaaaaaggaaggttgcacgggtataaccggatgatcggattgcgaggcatcatatcagcttttaatgctggttgccagaatagatatgaagttgcagaacatctgcatgtcacagaagaatatttgcaagaagctattgactgctacaaaggaaaatacggtgagtatattactgtagataattatgttatttattttattcctaatttagcagttatggaaatgatataatcgctacagcgtttatatagagtaaagtggtgtaaaggtacaggagaaaagagggaaaatgggatttactgatatttttagaatcaaaagatttaaagatgaaatagtgcatttgcaacaagaaaaacagcaaatgcaatctgaattatcagaagcgcaaagtaagctacaagaaatgggggcttatgaatactacgaaatcaaagctaagacgaattcactgaaaagcaattatgaggtaaaagaaaaacaactggaggacaaatatgttcaaaaacaagctgatttagacaggctgattattgaaagaaccgataaaagtcaagaagttttagagcatttaactgagctgcgtacagatgaagctaaaatactcaagaatataaaaactcaaaccaataaacttaatcgttctaaagagttggtgaaggctataaactatacttttgagaacttttttaactattctcctgagcagaatgatataaaactacaaaattatgacttagaagaattagaagagataagcccatctgttattctaaaattgcactgtatggatgttaaggatttacgtaaagcttatagactgaacgataaacaaattaactccgttttagaaaagtatgctgctcgctatacgacaaaggcgaatcaggctatttacaagctcatggtaatagcattaagagcagaattgcaaaatattttatacaatttaaaatttgagaaattggataaatctatagatgatgttaaaactgtcactcagaaatatctaaagattgccggtgatgggaaccaaagtatagcaggaacccttactaaattcatcggtgaaatagagtatctatttattaacgccgtaaaaattgaatacaattattacgtgaaaaaagagcaggcacggcaagaacaattagcccttagggaacaaatgcgtcaagaagctgaagaacgaaaagcacttgaatcggaacgtaaaaaaatagaaaaagaagaaaccaaatatcaggcagaaattgaaaaacttagagagcagatgtccaatgcaaaaatggatgaactggataaattaaatgcacgtatactagaactccaaacacaactctccgaagttgtagttaaaaaagaagaaatttcaaaccttgcaaacggaaaagctgggaatgtatatatcattagcaaccttggttcttttggtgaaaatgtatttaagataggtatgacaagaaggttaaatccacaagatagggtgaatgaactcggggacgcttctgtaccatttaagtttgatgtgcatagctttatcttctcaaatgatgcagttggacttgaaagcaagttacataatattttaaatgaaaaacgtgtaaataaagttaatatgagaaaagaattcttctacacgactattgatgaattagagaacttagtaacagaaatcgaacccacagcagaatttaataaaaccatgatagcagaagaattccgtcaatctcaatcaagtgattctctatacacttctgatttcgagattgaggatgatagtgacgatgaataataaaacaaaaaaccgtcccactgctaccaacaccgggacggcaatacatatccgaagatatgcgatcaaaatccaagaatattgtatcatcttcggaaacagcttgcaagcggaacatttgttcatgtgctggctgttatttttgtacctatttttacataaattaaatgaggagatgatctaaaatgagcgcaagatatgcctatggttacgtccgtgtatccactgataagcaagaagaactttctccggattcgcaagagaaactattacgggaatatgctgccaaaaacaatattatcattttgaaggttttctttgagatcggaatatccggtagaaaagctgacaagcgtccagaattccagaaaatgatcgggcttgcaaaatcatccgatcatccggttgatgtgattctggtttggaaattcagcagattcgcaagaaatcaagaagaatctatcgtatacaaatccctgctgcggaagcaaagcaacgttgatgttgtgagtgtgtcagaacctttgatagatggtccattcggctctttaatcgagagaatcattgaatggatggatgaatactactctatccggctttctggcgaagtcctaagagggatgaaagaaaaggctacaaaaaaaggataccagatgtccccaccttttgggtatcgtgctgttggaaacggagatccttataaaattgatcaagacgaaatgaagattgtagactttatctgtgatgaatttgattaccgcaactcagataccacaaagataacaagaaagctaaacgatatgggagtccgcacaagacgagggaaccctttcgaatcccgtagcgtagaaagaatcttgaaaaatccattctattatggtcttgtcgcgtggaatggaataacattcatgggaacgcatgaagtccattactcaaaagaacgcttcgaagcccgcatgaaaaagatacagactacatacaagccactgaaacgccgtgatgtatcctcatgtaaacattggttatcagggattttaaaatgtggatactgcggggcctctctcgcctacaatggtgcaaacaggcactcacctggtttccagtgttataagtacagtaaaggaatacataccgaatcctgttcgatatcagagaaaaaagtgatcgctgcactggaagagtattttgaaaaacttctttccggtatggattttgaatactcctaccactctgctgagaccggtgcgaagatatcagaacgtgaatcgctcctgtctgaacttgataaaatttccaacagggagaaacggatccgtctcgcttatgagaatgaagtagatactttggaagaatataaacggaacaaagagcgtctgcaaaaagacagggaagatattttgatgcaactggaaaatctcaataagaataatgaagatacgaaaacaaaatctgacgtgctcaagaacgtgcaaactgtatatgatgtgattaaaaatgatgcgatcgactatggtaccaaaggcatttttatgagaagtttggtggaagatatcgtttatgacaagaaaaacggcaaactgatcttccacctttatatctcgtgagccctctgtttataagggtttacggatatgttataggttactgcaatcagggccgccaaattgtgaaatgatcactttggcaatctgtgggttcgtttgtgtaatctttaccggatattgcaatcgtttttcataattccacataatcagcatcctccttcctgccatggccacggctcattgatccatttccagtattcactgcaggatgctgtggctgtatcgatcgtcaaaggtccgaaattcatggcatattctttcattgcctgattgcgcatccggctgtatttttcgaaataagccagtgcatccggatcctgcgggtgggtatccagatataatttcacttcatccaccgcgaaactgacagcgttgatatgatttaacaattctgttctacatggacggtctgtcattgattacatcccccttttccataaaatggtttgtttaaaacagggaagatcgttccacattctaatcccttatgaacatcataagtgtcttcccatgtctgccagggaacatatgccatcgcgagagtcatatgttccagcggatcacggggaatgcggcaggaacaaggtggcgagactgcttcaccacaggaggaagaaggattctgtcgacgctgcaccggcatattgcgataaggctgctgttgacaggtaaaccgttcgtttctggaataagaccgattattttgcatagtgtgttctttcctttcatataattacagtacataatatggaaaatctgcaaaaaggtgaattttgatgacaaatacaactctttcctgtacaatggttctgataaatgaaatacgaccaaaaaggagttatgtcatgagtattttaaatgtagagcatctcacacatggatttggagatcgcgccatttttgcagatgtatcctttcgccttctcaagggagaacatattggactggtgggcgcaaacggagaaggaaaatccacttttttaaatattgttaccggaaaactgatgccggatgaaggtaagattgaatgggcaaaaaatgtccgtgtcggataccttgatcagcacacggtcttagaaaaaggaatgacgattcgagatgtattaaagtccgcattctcatatttgtttgaactggaagaacgcatgaatgcaatctgcgattccctgggagaggcctctccggaagaaatggatacgatgatggaggagttgggaaccattcaggacactctgactctgcacgatttttatattatcgatgccaaagttgaagaagttgcaaaagcacttggacttctggatatcggtctcgaaagagacgtaaccgatttaagcggcggacagcgcaccaaagtccttctggcaaaattactgcttgaaaagcccgatattttgcttttggatgagccgaccaactatctggacgaagaacatatcgcatggctgaagcggtatctcatcgactatgaaaatgcatttattttgatttcccatgatatcccattcttaaacgatgtgatcaatattatctaccatatggaaaatcaggaactgaaccgctatgtaggagattatcatcattttgaagaagtatatgccgttaaaaaagcacagttagaggcagcctacagaaggcagcaacaagaaatcagcgaattaaaagactttgtagcaagaaataaagcgcgtgtttctacgagaaatatggcaatgtccagacaaaagaaactggacaagatggacgtgatcgagcttgcagcagaacgtccgaagccggaattcaaattccgatacggaagaactccgggaagatatatttttgagacaaaagatcttgtgatcggatacgatgaaccattgtcaaaaccactgtctctttctatggaaagagggcagaaaattgctctggtcggcgccaacggaatcggaaagacgacattgttgaaaagtattctcgggctgattcctgcgatttccggcacctgtgaactgggagaaaatttgcagattggatattttgaacaggaagtcaaaggagataatcgaacaacctgtattgaagaaatctggcaggaattcccttcattcacacaatatgaagtacgttctgctctggcaaaatgcggacttacaacaaaacacattgaaagccaggttcgcgtcttaagcggaggagagcaggcaaaagtaagactctgtaaactggtgaatcgcgataccaatatcctgcttttggacgagccgacaaaccatctggatgtggatgcaaaagattccttgaaaaaagcactgcttgattatcgtggaagtgtgcttttaatctgccatgaaccggaattttaccaggatgtcgtacacgcagtatgggattgcagcaagtggacaacaaaacagatttaaaaagaaaaggacttgatcttcattgaatttcaagtccttttccagatttatctaatcaaatccgcaaattctttctcaaactccttccactctgcatctgaaaggtgatgcacaaagtcttcctctttccactcctctccaacaccaaaacaggcatgatcggagcactgatatcctacttttcttgccattgcaactgcgaacaaccgataggcatcgccctgtgctgtaatcacattaccatcttccacaactggttgataccgtatattctccatatcgataaatggcagtctttcgttcatttccagatacatggaattggtgaattttttatctttcagaagtcctgcttttgccaaataaatcggtcctgcacagattgctccgattggaaaagtttcatttccttccaagcccctcaaaaattccataaacttttcatcccgaatcgattgcctgatatcactgcatcccggtaaaatcagacaatcatattcttccacacaaaactcttcatacgtaatatccggaaggatcgcaaatccttcttcagacctgaccggatttttatccccggaaatcacaactgtcctggtgtcaaatccccagcggaacagtgaactcaaatttccgatttcctgaaaactaaattccggatatacaacaagtgctattttctgattcatcttttctcctttcaaatttctcaattcttttacctttgcgcttgattatactgaaaaaattccttttttcaagatttttcggaaaataacatctgcagcaattcctgatgcggatgttctgaatctgcctgaaacacatccacacaattcaatgccgctcccccgtcaaaaaaggccggaaataaaaatccacattccggttctcccggttcataatctcctgtaaccggagagatcacgcagatcagatactcaaacatctgctcagattctcccagtcgttccttatccttcgcctttgcaggaatatcataccgatcatgaaacaaatacacagcatacttccctgtccagattctggaaatgcatagcgtttcagattctgattggtctgtgcaaatggaaccgttttcgcaagctccagatttttctcacgttctgcaggagatagtttcagaaaattcacgttaaatgttccgtcaataaaaccttctgcgtctgcatagcatcctgagattctggtcatggacgttctttttactgtcatgcgccttgtcagggcaagcatctcttcacgattgatgttcattcttttttccaccttcctatcgtcccattccggcaacaatcttctccactacctccagacacagatctgctgccgtatccattgtctcctgaaattcttcaaaaccgccttcaattccgtcactcacacattttatcaacatgcatggcacctgatttcgattacaggtaagcacgattcccgcagcctccatttcacagatatccgcaccaaacatttcatgcacttttattttctgctcgggatctgcaataaatttgtctcccgaagcacagactacgggcactaatctgtaattccattataacttctgcacattcacgcagatctccagtacattctctctgtaatccgctgtgatggttccgcccattttctccatcagtgcctttgcaatagacaatccaaggcctgttgattttctggccgtattcacggtataaaaacgatcaaataatcgttctgcctgtacttctgacaaacctgatgcatggttggaaatccgaatctcaccgtcttccgacaatacaattttcaaatcgccgtcactgtacttcaccgcattactgagaatattgccaagaacacgggacagagcattttcatttactctccccgtgatctgttgatccgaaatcgaaatctccggaacaatatgattctgctttaaaacggagtaatacgcggatatgctgctttccaaaatcccgtttaacgttaagacttgaagcgtcatctcttccgcttctgatatcacaattgtataacgaaataattcttccgtcaattgtttgagtgcctgtgccctgttttcaatcgcatccagataacgctttatatgctccggacactcttcttttttgagtaagttcaaataaccataaatcgcagtcaatggcgtccgcagatcatgagagatattggtaaccgcttcttttagttccaggtttccctgttcatagcagcgtcttttctcataaaatgtttccaactgcagattgattgtagaagccagcgcacacatctccctgtcacggctggaaatctggattatggtgtttgtattggtcttcaataatttctgaaaatctttcctgatttcttttgctgattttcgcaacagatacaccttgatctgcagcacaatattatacaaaaccagaattcctgctccacaccatactccaacttccatttccactcacttctcctatttgatatccttccgattaaatagatacaatcctgccaggctcgttccgaaaatgatcaaaatcgaatatcccatcattcttccgagattcagaactccctgattaaaaatctgtacggcctgccctgccggcagaaaatccaggatattttgataaaccgtacggcttattcccgtcagataagcaggattttttactgtttccataacggtttctctatttacgattaccgcctgtgtgatcatctccggctgagacaatttcgaaaaaacaatccccgcaaacaccatcataaaaaccgccgccagaatgcagactaccgcagaggttgtcttactggagcttagcatggagatcatatgaaagatcgaaacataagaaagcaccagcaaaattcctgccacacaattctgcagcattgtcaaagccggcatctctatcacgccgaacatgggaatacctgccgcaaaccctgccgtataagccaacaacacgctgcacgtcccaaccagaaagctgatccacagattcgatccatatactgcatttcttgaagaaccgatgatcagtttatttctcaatgttccatcgtgatattctgttccaacatataaactgacaaataccgaaagcaaaactcccatcaccagcaaaaaatgaaatagaaacggatccagtagataatttgccccactttctttcatctgcatatattgcgaaagcatcaggcagacactatagatgggaggaatgataacacaggcatatgcgcccttatttttgcgaagccgatagagtcccgcacgaaataatttattcatgcttgccacctcccactaagttgagataatagctttccagactttcctcgtattcctgcacggaaaacatcctgcaattctgttctgccaactccaacgcaacatcggaaactaccagttccccataaacatttgcctgcgtatctgacaagatctcatattcaagacctcttttatccagaatatgagcgagtacagcagtatccgtcacctgcagtttcacacatttcctacaggtattttccagctcttctgccgtaatctctttcactatagttcccttgtcaataaatccataatgagtagcaagtcttgacaattcatccaaaatatgacttgaaatcagcaccgtgatctgtctttccctgttcagctttaatatcagttctctcatctctacgatcccctgtggatccagaccattggttggctcatccaacacaagcagatctggttttcctgccagcgcaatcgcaattcccagtctctgacgcatcccgagagaaaaatcttttgcctttttcttccctgcatcttccagccccaccagtttcaaaatctgagggattccttcaaaagacggcaaacccaaaacataatactgctctttcatgttttcttccgccgtcatatccagataaatcgacggtgtctccacaactgcgccgattcttctctgcgcttccaaaattttcttgtccgtattttcgcttccatataacctgtaacttccggatgtcggtctttgcagtccgcagatcagacggatcaatgtggtttttcccgccccgttctttcctacaaatccataaattgcacctctcggaacatgcatagaacactggttcagtgccttaaagtgcccatagtttttgcataaatgatcggtagttaatacatactccataacaatttggcctccttaccttttctttccaacatattctatctgtaaagtgttaagaaagctgttaagaaaagtgcaaagaaactgtaaatatttctcactctgccatcttaaaaccaattccccatactgcttctatataatctttccccgagatttccctcagcttctttctcaaattactgatgtgaacccgcagtgaactttccatacaatccggtgtttcttcgctgacacggtcaagcagcacagtctttgtgatcacctgttttggatgctccagcaaaattttcaagatggcaaattctgtctttgtcagttttacctcatgttccccaacccatgcttcatgcgtaaccatattcactgtaatttctctatacatcagtttttccgaagaatccagtcttgtacttttcctgagctgcacaacaatccttgccagcaattcttcaatttcaaacggttttgtaatgtaatcctccgcgccattcagcaaaagagcaaccttatctttcacttcaacctttgcgctcatcacaatcaccggaattttttcaatctgcggcagcacttcctctcctgtaagccccggcagcatcaaatccaataaaatcagatccggcttttcgtttgccagaaacagtaatgcctctgtcccggaataggcatgggaaacctgatatccctcctgtatcagaacctcttccagcatttcattgatatgaatatcatcatctatgattaaaatatggctcatagaaagctccttcctgatttcaattttcttattcggaatttataaaatttttgccatataatactcgtccacaacttctccttttaccaacattgattttgctcttattccttctactttaaaatcacttttttcatataattttcttgctgcttcattatgacattccacagtaagctccagccgaatgacagaattttccttcgcccatttttccagattttcaaaaaaagtcgtgccgatccctttcccctgatactctttcaatacacccacaacaatatatgcagtatgaaaatttcgatgaaactctcccctctctgcccggagataccccactattttattgtctgcctttgcaatttgtaaaaagtcatttccatgtatcacgttatgatagatatccgtttctaattcttgaatatccatatgctgctttctttcatttggttcatacatcataaaattcgtttctgcatcaagagcatttaacaaactccagaaatgttccatttcttcgatttctatctttttataaatcacctatatcccccttatcactttagaaccgttttcggctcctttgtagcttccggatttaaatcatatcttcaaaattgttttctatttcataaattcctttatatggacattcaatataatatttcccgttctcttcataataaaacatggttgtcattccaccattattttcaatatttatcgttccatattcttctgctgacggataatcttgaatcgattgtttctccgttcgttttccagtcgcaatctctgataatatcttctggatgctttctgaatcatcatatattttttgaatactgttcgtgaaatcaatacaaatagagtcaacattctccgcttttggaagaatcggtgagcgattatcctctgcacatccaaaacacagacataaacaaattcccaatacaacaaataacttcttcattctacttctccatatgtaaattaagcccttgcctttttcagacaagagacctaaaaacttcttcacagtctatcatttcctcgctgcaatcaaataccgatgaatcgtcccttcaattttcccttgattctcaattatcctttgcattttcagcaactgctcaaagcatttatcaactgaaaaaccaggaaactcccattcaataatatgtgcaaaccatacaaacgcaccaatatcataaaatttaattggtcgatacgcttcctctgcagcaagaatatgaaatcctgcatcgacaaacgcatttctctgctcttccagatttaaatgaggaaacggactttccacttcaggcagaaccatttccactaaatctctatcgttatcgccgccaacctgttgtgtaacaaagattccacccttttttaataatcgatacaattccctggcatcaaaatttccatgcctgtttataatcatatcaaatgtctcattatcatacggaatccttgaaggtgtattacactctttaaaatcaattcctaaaggcagcaacttctcctgacacaatcgcacattcggctcgaatccttctgtcgctgctgttctggcaaacggatgattcagagacaataaaaattcacccccgcccgtatcataatccaacactttggccgtatccgttaaatactgtctcacgatcttctcataatcccacggcaaatcattctcttcctcatacctcccatggatatgcgaaaaatcccaacctttgatatatgccgtcttctcttcctttttccaaattgattttaattctgctctattcattttaactgcttcctttcaaattttctataaataaaatgatttgatcggtgcagccctgccagcatatgtttttacttttattttaacctcgatacaatctgctgccagttttaaaactgcaccgagtaattaattcgtttcattctctctaacctccgtattttcaatttacaatagctcctttagtttgtcaagaaacgactttttgccccacaaatgggtctcctgctgtcaacttgatctccgtatataaattaaatccgtaattccattataatgctgcgtttttaccagccttaactctatactcttgttcagcttttcaaaaagccgaatcccgtctccaagcaatacaggaatcactgagatataatactgatctatgaaatcttctgacagaatctgctggatcaggtttgctccaccgcaaatccagatacctttcccgctttccgccctcagctttcttaacaaatcaaccggagactgcgttacaaactgaattttttcagcagatgtctgcttcgtatgtgtaaacacataagtctgaaaatcatcatatactcattttcccggagaaagctctgttacaatctgatgatatgtattccaccccatcaataccgtatcaatatctttggcaaattctgaatacacatccggcattttttcatcaccatgccctgtcagccaatcaacaccgccactttcatccgcaatatatccgtcaaggctcattgcaataaacaaactaatttttctcatcttttcaccattataacaattctcttagtttctcaagaaacgcttcttcaccccaggtattgatcttgaaaagcatcgcctgactgccgcctgcagcaatcgcagaaagttgaatcggtccgcttccattctgaaaaagagttacattcaggctcacccgattatctccaacataactatatcgttcgaaaacacgaacactgcatctggcagttccactttcaaagtcactgaactcttccaatgaggctgacatactactgttctgtatgccattttcaattttacgaagtaattcataaaaatctccacttactgtctgttctaattttgccatcttcgttctccttctcttttaaagtcacagtctgcaaatagccgataaaaactttatgcgcatcttccatcacctcggaatccgagagcacatgatacagtggaaacaaatcctctgttgtcagtttttggattgtcagtttttctgttttcaagaacacgaccgcctcacctctccatacatttaaccgcacctacagtctgtataaaactcaatattttcttttgaaattcttgtaattttcttctgttctttattttttctgatttccagattccataattaatctgaatatcctgcaccgcttcatccgatatcagctcatccatactcaccttcaattcaagtgccagcttttttgctgtgatcaaatccgggcatcttgagccgttttcccatctgcagattgtctgtcttgatacatacaatttatccgcaagctgctgttgagtcagatttttttcttctcttaattttttgatgttatttccaaatgccatactctgtacctccctttgctcgtatcatataacgacaaaactcaaaaagaaagcaccatcctgtattttctttgtttccattttggtaacatcattccatcaccatttttcatggatatgaaatctatgttccgacagaatctactttattctgattcaaatatgcatcagtaaacagaagttgtatttgttaaaatactaaatttcaacagtttctccgcaagatatataatatatgttattcatatgatgagacaaatagtcaaatgctgccttccctgtgcaatgacacgtataaaacttcgtgtctttatatttctgtaattccatcacaatatcatctaacagtccctttgatactgatttccttgtaaacggattgaacaaatgaaaaccaccaatacaaaaacatggtcggtacttctctgctttttgcatgatattaacaacgccagcatgtccacatcccataataagtactgcctgtttttctgaaataattagtgtctgctgattaagcagctatctgtaacttccaactcttacatctgttccggtcatgccagaatcggaacagatgcaaaagagcacaaagtattcgcctctgaatcctgaacagattcgtcacgaatacagataatgcgatagatgtcaactgcgtttcttccagttttgtggtaatgcagctcataccataacagcgtttgctcaggctgaaggtgcgctccacttcgattctatcggtattatcctgatactcttgttttttatcaacttttgctgtggcgcttggtctgcccagctttggacctgataaccggatcccatgctctttgcaataactcctgttttccctggtccggtatatctgatctgccaggacacgttctggataataaccggtacgctctttgaagcgttctattgcttcaatcaggcaggtgctctcgttgtatgcctcgaaagatattttttcgaggcgcccataaccttcgctgtcaagactgagatcaaattttgcaccaaattcaacaggtgctttgaccttccctctgacaatcggccgaagccatggctgcgaaatgcttacaatgcgatgctctacagaatggattctgttatcatacatatactgttgctgttcatacagcctgatgatggtaagatataggccgatatccttacctgtcatggcgtatccatcactcatgaactgttccagatagccaagatctcttttcacgtagccaagctgtctgcggagtgcgctgcggattttctttgccgtgtgctttctgctcttggcaaatgcaagatactcttttctggcacgtttgcggtatcttcttggcaacttaagaccataacatttacaaaaacagtaaatcatgttttccagcttttctcttgcttcgttcaaaagcgagatgtcctgcggataacgtatgtttgcaggtgcgcaggttgcatcaagtgtcagagtccctttgtttgtatcttcttttgcagtaccatcatcaccggattttcctacggatggaggagtatggtcatctttgtcatcctccttgtgagcaagaagatactcatttacttccatcagcatatctgctgaaatgcgtttacggaaaagaaccagtgtacttgcatcaaacggagcttcttcccgaaaaccgggaagcccgataaagtattgcagatacggattctcagcgatctgttccacaagctcacggtcggaaaattggaacttggtctggatgatcagggctcctaatgccatgcgaagaggcttggcaacattacccgtatcacttggaaacagcttggcatattttacttcgaattcatcccatgggattcggtcagccagtctgacccagcggttatccggattcatgtggagtcccataggttggttgaaatcgaggaatgaatgctgtaacttgtcgatcggtttgtacattgttttagcccctttatacttaaaatctgtaagaaaactgcaagaaaaacgatttgtttttgtcaaaatccttgcaatcattataccagaaaatggggcaaaagtcagtaaaatcaagtgttttcagtttgctcagcagacactacttaaagcataacgcccagtaacagacaagaggacttgcaaggtttctgacctttcaagtcctctgctgtatcatggtactgttggctgtgtccgttctgtcaaggactgccctacggcgtatcggcttcgccttgttccttgacctcactacatttctctcaactttttagaaactatgaaattacaaagaaatgctaccgctacaataataaagcaaatgattgtacaccatacaggtactctcatatctaattgcactcgtaacaaaatcgtgattgctaaaaatacagctcccaccatttgtataaagtctaatatctttttttgaagtgtctgtaaatgctttttatcttttattctttcagatttccatattccataatttacttgaatatcatttacatcttcatctgatataagttcgtccatacttacatctaattctaatgccagtttttttgccgtaatcaaatccggacatcttgaaccattttcccaacgacaaacagtctgccttgaaacatataacttatctgcaagttgttgctgagtgagatttttttcttctctaaattttttgatgttatcatttaatgccatactccatacctctctttcattcacatcatataacgatagaacccaaaataaaagtaccagtatgtatttcctttgtttccattttggtaacatctgtttattccaagttttctacaccataatatcgatatatcactgaaccaatatattttgtaaccccttttccgtactgtttatctgtgtcttcttccaactgagaatgattcaaataatctttagccatttctaataatactactcttgcattatccattttaaaaagatttttacaacttttccccaatctttttactgctttcattgacatatcttcatctgaactttccattgcacaagcaaactgtttataaatcaagtccatctcatttttttgctctgtaacttcttctctagttcctgttgacttcagacttgcttctactgctttttctttacttccatatatcttaattaaatgctcacatgccttttcatctttaaagccttccgcaacagattctttaaacttctcaatatctccataatgctcgataattattttcttgtcttcttcactcataatttttaaagaatgttgtattattttttgaatatcatctttattaaatgtttcaaaactcatcttgtcctctcctttcaacacatcagaaatcaattcgataataccattcaaacgattccgtttcatttctagcatcattttctgtgtttcaagaatcttacgattatcactttcagaattcttcataattgcttttatttctgacaatggaacttccagttctcgaaaaaacataatctgacgtaattttttcaatgagctttcatcatataaacggtatcctgcttctgttactttagcaggttttaacaaatcaatttcatcataatatcgtaatgttcttatgctaattccagtcaattctgatacttctttaactgttttcataagtcctcctttccctttcatcgtaaaccgttacgttactagtgtgctgtatcgttgatatttaacattactactgcatcttattcagatgcagtagtaaatgtcggatacaaggaattcaatttaattcttgcatcctccgttcgaaattgccagtttacctttgcggctacggtatttcgttcaacttcccatgctgataattccttacgaagatttgaaatattatcaatccttctgttcaaacattgtctggtcatgacgttaagttcgatttctgcaatatcaagccagctgccatgttttggtgtgtagtgaatctccaaccgtttcatgattcttctggcttcatcagcagggtaacgtttgtacaatgatgctggtttatgtgtattaagattatccattacaagaattattttttctacatctggatacatgacatcggcaagatatttgatttcttctgcccagtcaattgcagtccgatgttcccgaacacttacatgatgagctccaccaagcggttctacgaatgcaaagatgctgcatgtaccatttctgacatactcagaatctactttctggtcattgccggggcgcataggaagtggggatcttgcctcgccaagtaactgatatggtttttcgtccatacaaacaaaggggcgttgtgggttatatggaagttcgtatacatcgagaacatcctccatacaagctataaattctgcgtcctctcttgagggaatgcaccagtattcatttttgtgaggtcgaagtttgttttttttaaggctctacggatagcatctttgctaaccggtgtatcaagcactactttggcttctttttccagcagacgcaaagtccatctggaatgaccttctggaacaggaccgcaggcaagttcaataatacgtgcttctgcacgtccatcaaggatacgccttgcattgtcggaattgatatttcttttgaactcggtaaccgcttcaatgccaccggaaaaatatttggtcactgtattcgttacagttgtcaggcaaacaccatttgatcttgcggattgctcatgggttaatactttcccatgagcctcatccaaatcaataataatctggcatctgcttcgaatagttttagatgtattacttttgcgaattatagattttaatgtcttcaattcatcatctgtaagtttaatgacatattttcttggtcttgccatataaatcaccgccgttttcttttattttaacatgaagcggctataatagctataaatatttagttaaatgtcaacaatacagtacactagagagtcaagatgttttttctattttatcacaaattcaataaaaccgcccttaattttacaaatgagaaatgacgcaaataatgtttccactacctacgccatttctcattacatctttgaaatatttactccattttctttcaatctttactccaaatttactccattctaaaaatctgttacgatattttgcggtattctacgataccttttctttgaagaaaaatgtctgtaaaccttgatttcaagcgaacttttcaatattcccaagcactttattctgttgtgagaatttcttctcaattatttcattacaatattaataatcttcttcggaacatagatttccttaatcacgtttcctgtcagtttatctgcaatcgcttcttttcctgctgcgatcgcatcttctttggagatatctgctgcgatactgatcactgcttttgtctttccattaatctgtaccggaacttcgatctcatcatctttcatctgtgcctcatcgtatgtcggccagcctgctttgaagattgtctctgtatgtccaagctgctcccacatctcctctgcaaaatgaggtgcaaatggagaaagcaggactgcgatcgtctccagagtttctttatcgattccgccttctttctttgcgatctcgataaacttgttattgtactccataaatccggagataacggtattcaggctgaagctctccagacgcatggtgatatctgctaccattctgtggcgctgtttaatcatctcttttgttgcctgtacttcattttctttgctgtctatcaacagattccacagacgtttcaggaagcggttgacaccgtcgattccacggtcatcccactctgcatccaactccggcggtcccacgaataattcatacattctcagagagtcacatccgtagttgcgtaccagatcatccggagatacgacatttcctttggacttactcatcttgattccattctttcctgtgatcattccctggttgaacagcttgtggaatggttcatcaaagtctacaactccgatgtcatgcaggaattttgtatagaaacgagagtacagaagatgcagtaccgcatgctctacaccaccaatatacatatctaccggaagcatctcgtccgctttttctctggaaaccagttctttgtcattgtggctgtccacataacgcaggaagtaccaggaagaaccagcccactgaggcatggtatttgtctcacgttttgcgtcttttccacaaaccggacacttgcagtttacccactcttcgattccggcaagcggagattctccggttcctgtcggttcataagaatctacatccggcagacgcagcggcagttcttcttccggtaccggcactgctccacattccggacagtgtacaatcggaatcggctctccccagtaacgctgacgggagaatacccagtcacgcagcttatagtttacagttgcttttccaattccacgctcttcaatgatatgtggagcttctttcttgagaacggctgattccattccgttccactctccggaattgatcatagttccaacagcatctgtgtatgcctcttccatattttcgatttcctgtccgtcttttgcaatgacctgaatgatcgggatctcgaatttttttgcaaatgcaaagtcacggtcatcatgtgcaggtacacacataattgctcctgtaccataatctgccagtacataatcagacaaccagatcggtacttttgcaccgttgatcggattgatcgcataacttcccgtaaacacacctgtcttttccttatcctgcatacggtctacgttggacttcatggaagcatcataaatatactgctccaccgcttctcttgtctcgtctgtcgcaagttcttttgcaagtgcatgttccggcgcaagtaccatgaatgttgcaccgtgtaaggtatccggacgtgttgtataaacggtgatcttgtcgtctcttccatccacctggaaatctacttctgcaccgtaagattttccgatccagtcagcctgcattttctttactttttccggccagtccagtttgtcgagatcgttcaaaagacggtctgcatattttgtgatacgcagcatccactgacgcagatttttctttgtaacatctgttccgcaacgctcacattttccattcacaacctcttcgtttgccagacctgttttgcaggatggacaccagttgatcgggaactctttctcatatgccaggccctctttgaacatttttacaaaaatccactgtgtccatttatagaaattcggatctgttgtattaacttccatatcccagtcatataatgctgcaatctcattgatctgacgcttgatgtttgctacattctctgctgtagattttgccggatgaacccccatcttgatcgcatagttctctgccggaagtccaaatgcatcccatcccattggatgtacaatgtaatatccctgctgtaacttataacggctccatacatcagaaattacatatcctctccaatgtccgacatgcagaccgtttcctgacggatacgggaacatatccagacaataatatttttcttttttctctccgttgtccctgaatcttggatttaccggattttcctgccatttatcatgccattttttctcgattgctttgtggttgtaaacaatttttgcacccatttcgcatatcctcctttgatttctaaaaaagccttttcatctcaattaagagacgaaaaggcttttatcttccgtggtaccactcttcttcatctgcaaacatacagatgcactcattgcttctgtaacgggaaggcccgctttttcctacttttccatcctgggtgttcagaaaaagaactccgaggggagttgggagaacgctgtttcctgcctcgcaccatccggcaggtctctgaaaaacctcagactcttactattcctcatcaacatttctttcatatgttttcttattataaaaagaatcataaaataagtcaagtagatttctttgattttccacttatttcattctgccaaaataatcttttgtttctttcaccactacgttgctaagcgctagcagtgcaatcaggtttggaagcgccatcaacgcattgaaaatatctgcaatgttccatactgctgcaacagtcatatacggtccgataaatactgccagaatgtacagccagcgatatgtcattacaactttcttgttccgattgaagagatactccatacaacgctccccataataattccatccaagaatcgttgtaaatgcaaaaaataccagacagatcatcaatacaaaagatgcaattgccggtgggaatggcaagcctttctgaaatgccgccatggtgatctccaccccttccagattcggatcgttccagcttcctgccaaaacaacagaaattccggtcattgtacaaataacaatggtatcaataaatgttccagtcatagaaaccaatccctgacgcaccggttcttttgtcactgctgctgccgccgcgatcggtgcactaccaagacctgcctcattcgaaaagattccccttgcgattcctttctgcattgccactatcattgttcccattgcaccacctgctagggcacttccggtaaacgcagatttcacgatcgttgcaagggctgccgggatttctgtaatgtgtgtgaccataatgatcaatacaaatacgacgtacagaactgccataaacggaactacaatttccgatacttttgcaattcgcttcaatccgccaatcacaacaagaccaacacaaacggtcaaaataatacatgtgatcacagttgcccaggaatatgtatttccgaacatctgcactgcattttcagtattcgggtcaaagaaattttttactgcagatgcaatactgttcacctgagtaaatgtaccaattccaaacaatccaactccggctccgaaaaatgcgaatatttttgccagccagcgccagttttttcccattccattttcaatataataaaacggtccccccagaacatgtccatcctgatcaatggtacgatatttgattgcaagcagtccctctgcatacttggtcgccattccaaaaaaagccgctacaaccatccagaacaatgctcccggaccgcctgctgcaagcgcagtggcaacccctgtgatattgccggttccgatcgttgcggaaagcgccgtgcaaagtgctccaaaactggtcacttctccatggccgtcatcttcatttttcaccatgaatctgagtgctttcggcaggtgccgaatctgaagtccgccaaggcgaacggttaaatagatacctgttgtcagaatcaatataataagcggcagtccccagatacggtcatccacccatttgattgctgtgtcgatttgactgtagatttgtgctaacatactttctttcctccatccttttgcctgagagattctcagcaaaaccgcatccagattatgcgtctgctgattacaccttcggcgctcttttttcagagactctcctgagtttagtgttttacaacactaaagcaaagaataacatggttttgaaaagaatgcaagccattttctgattttccattttagaaaaactaatcaatgtttataagtaagatgcagagggaatacagacactgctccctctgcttttttctatcccaacgccacatccagaatcatcatcagtgtgaaccctgctgcaacaccgattgttcctacattggtatgttttccgttttgtgcctccggaatcaactcttccactacaacataaatcatagcgcctgccgcaaaggagagaaaatatggcagaagcggaactacaagccccgtcagccagattgtcagaaatgcggcgatcggctctacaatccctgacagtgttccatacacaaacgccctcagttttgtaattccctgtgcccttaacggcatggaaataatcgctccctccggaaaattctgaatggcgattccagcagacaatacaaatgctcctgtcattgttatcagtacattatccgaaagaactccggcaaaggtcacacccactgccatcccttccggaatattgtgcagcgtcactgcgagcatcaacattgttgtttttcgaagtgatgcctgaatcccttccggctccaattcctgaaagtgctggtgaggtgtcaccgtgtccagcaaaagcagaaaaccaattccaagcagaaaccctgccgatgcaggaatccatgcaatctgtccgccttcctccgccatctcgatggccgggatcaaaagcgaccagacagatgctgcgatcatgacacccgaagcaaatccgagcagacctttctgcagcttttcattcatctcttttctcatgaagaataccattgctgcgccaagagttgttcctgcaaacggcagtaaaattccaagtattacatccaaattcatatgtttctccctttcgtaattctttttttcgatatgttatcctatgctcaggagaagactttggttccgtttaaatgcacatggaaaaagaatccttataccgatgccgtgatcagttcctttccggctgcccggcattcctccaacgcagcatcatccggcgtctcgtttgcgatcacaccttcttcacagatcagatgtgctcccgcctcttccattctctggcaccagtcacgcatccactctccgtcaccccagccgtaagacccaaacaaaagtagctgcttaccggagatcatcggctccagttcttccacgaacggctccatttcgctgtcttccaactgctctgctcccatagacgggcagccgagcgcaattttatcaaattttgaaatcgtatccgcatctgtctgtccaacctcacatacctccgcggttcctcctgctgcctgaatcccttctgcgaccgcctgtgccattgcctctgtatttcctgttccactccaatatactactgctgcattcatgtgaattcctccttcattattgtgcgatttcccggatactttttccggctaaaaattctctgaccactccttctttggcctgatcataagacttgaaaatcatttttgccctggacggattactatatactttccaatatccgatcataagatactttcttccttcattttgaataaatccttccacatcttccttcggataccctaaaaacactccgatttcatggggaaaccccagttttctgctgcttatctgcctcactctttgagccagtcttttgagcatctcatccagattctgcatatgatacccatatgcctcaagcagccgctgattgtcaggcagcatcagatgatactccaactcactccgtctgaaaaagaaaacaagacatctgctgtccctgcaggacagaattcgatattctacctctgtctcttcaaaaatctcctgcagctcctcacacattttctgttccattgtgatcacgctggatatcttgagcccctttaaaaagggggcgcactgcagcgcaacctgaaacctggcttttagttttatatcttcatttttgaaaaaataagacaatgtttccgatgacatatgagcctccttaaatgattatgattctcaattagtttgatattaccatgtcctactctcaatttcaacatttgttattgagaagttttctcattatatttttctgaatatttatctgcatttttattatttttttattgtttgagaaccttgtttggtgtataataaatttaagttatttgagcagaaagaagtctcaaaatacatacaaaaaggagagatttgccatggtaaatttaattacaggaccgaaaggaaccggaaaaacacagcagatgattgagcttgctaatgaaaaggtcaaaacatctaacggaaacgtcgtatttatcaaaaaaagtcatcgcaacactactactttagacttcggtgtacgtgcaatctgcatggaagactatcctgatattctgacaatggatgaatttatcggttttctctacggtatggtagcaggtaatcatgatattgataccatctttattgacagcgtattaaaacaggcggatatttctttaaacaacatttctgcatttatgaccagtctgagtaaaatttctgcagaaaatactcttgatttctttatcagtgtgggggctgagaaagaatccattcccgatatagattccgacaattataacgttttgaactaatgggtatgaaaaaagcgatattcagtattttttactgagtaccgcttttttatacattatggtatatctgtttttattattcttctgatattgcctgctcttcgctttccgcttctgatttttttgtctcttttgctttttgatccggctcttctccgttcaaagaaagtacagaatttgcccgctcaccttctttgtattctaccgtcacagtatcaccgacattgtatttgataatatcgataaaatcaacgactgaaacatcaaaaatatcatcagagccttccaacatgatataaaagtgagaatctccgtctacaacgccctgtgcgatctttgtgatcttggaagacagcgtctttacttctctcgtatcttccgcctgcttcttgatgccactctcatacatcagatcattgtagttttcttcacactcactgaccgtatttccaatggctacaacctgatatttctgcacattgaccatggcatactttttcaccagtccggcatcatctttcagcgccataaaataggtcggctcccctgaaatattcaaaagcaacgggaatgccgctttgtattttaagttctgcacctgaccttctgctgaagacatggcagactcttctgtcgcgccttccacttcatagaacttcgtctccatcgtacgctgattcatcagaacaaatcctacattggactggtctcctgtgatcgaagtcacacctgtatatacccatacatcatcatccaacgcaagatagttgtatcctgtcgtcgtatgcagacaatccttctgtcccagcacactgtttaaaaatccatgcttcaacgtaccataataatcatacagctgtatcagcatatctgcggagtacgcccggtcgatccactccggtgcatcttcgatcttataatctttcgtctcacctgtaatggcattacataaaaccactcttccaactgtggtacctccaaacagaccgatattgaatttcttcaccgggcagatccagtatggaactccgttgtcatcgatctcaaaacttaagtcattgaagatataagtcggatatttgaaccggagatgacggtaaatattgcgattgaaatgatcactggtcgtatacttcatcccttcatccaacttcaccagttcggtattctgtgtcgccatatcgatcttgatatatgccggaattccctcactctgattcgtgaaccatttgatcaggctggcataacgcaggggagatactctcacgggctgatcctggtagttgatctggctgtaccagtcatctacctcaaactgagagaccatatccaccatacttcccatctttctgtttcccaggatcgtcgcagaatctctgtcaagcagcggaatctgatcaaatgagagttcctcgatatcttttgtaaattctccatcctctactttcatcagcttctgatattttttcgcgttgacgatcggagaagacaacagtgtacctgctgcatacacgattacaactgcgccaagaatccccaggatcactttcatccccttggattctttcagcgcatatctgtcgaaccgctttcttttcgcatagaaaaatgctgctgccacgatcaccacgatcagaaatatccagaactccgtagaatgaatattgagtgccggcaatgcaacataatagtaaataccggcaagaataaccaatgccaacactgcaagaagtttcattttaccttttttcatgctaattccctttcctaaaaataatttctacttttaaagtagtgggacaattataacatcttcaaagataattcacaattcttcttgcaatttttatatctttttaatatttacctatgatttttccaacattttgtcttaaaatttccgtttccagagctccggtgcaagcaggacaagacaagggaagatttccagccgtcccagcagcatatccgcacagaataccagttttgacagccaagagaactcaaagaaattctcaaccggtcccacctgtgaaattccgggaccgacattatttaaggtcgtcagaaccgcactgacagaagtcgcaaaatcataattatcgatggacacgatcaaaacagaagataccaggataagcgcataacaaatactgtatacatatactccatgaagggtctctctgcctaccttctgaccgttcacagtcaccaccgtcactgctttaggatgcagaatccgcttgatttcctgctttacgctcttgcagaggatcagaattctcgacaccttcattcctccacctgtcgatccggcacaagctccgatgatcatggtgaccagcaaaatggttttagaaaattccggccataaattaaagtccgcagtgtagaatcccgttgtcgtgatcaccgctgccacctgaaaacttgaataccggaacgcacttgccacattgccgtatatatgataaatgttgactgtgatcatcaatattgccgcagcaatcacaccaagataggtgcgtgcttcttcattttttaatgcactcttccagttttttatgtaaattgcaaaataaatattaaaattgatcccaaacaaaatcataaatacggtgataaccccgtcaatatacgcactgtcataatagctcacacttgcatttctgttggaaaatccaccggttcccgcagtactgaatgaatgaattagcgcgtcataaaggttcattccgccaaataaaaggaaaatcacctctgccattgtcagaatcagatacatcagatacagaattctcgccgtactgcgtgccttcggaacaagcttgtctgcttccggtcccggtacttccgcgcgcatcagatacatggatccgtcatcatccagactcaaaagtaccataacaaataccaaaactcccattccgccgatccagtgtgtcagcgctctccaaaacaacattccctgcggaagcgcctcgatatccgtcagaattgtagaacctgttgttgtaaatccggagactgtctcaaaaaaggcatccagataatctggaatcgaaccggagataaaaaacggcagtgcaccgaacagtgaccacaaaatccaggcaatcccgaccagtgcaagcccttcttttccataaatactcgtatctttcggtttttttctgcccgccagcagaaaaataatgagcagaatggccgctgttaataaaaatgcaattccgctttgctctccatacaaaaaagaaacaagcgccggcaccagaagcagaagtccttccactcccagcattctgcctatcatataaacaatcattctattattcatctcattacctcttcaccaaaatatcgtccagatctcggatctgttttgtcatggtgataataactacactgtcacctacctgaatactgtcatccccgtttggaataatgatttttcttccccgtgcaatgcaggcaatgatattgttcgctttcagattcagatctttaagaggtactcccgtatacgcattctccgatttgataataaattccagcgcctccactcttccatccagtagctggtacatggtctccacatttgcactgcactgagaatttcttctcgcccgcacataaccaagaatggcatcagcagtcgctgttttagcagatacaatactgtcgagtccaagttcatcgatcatcatggctctgcggtcctcattgatctttacgatcaccttggatacactctgcttagaagcaaacaaagacatgatgatgttctcttcatccattcctgtcagtgcaataaaagcatctgttttttcaatcccctcttctatcagcagatcatgctccgtcgcatcgccattgatgatggttgcttgtggaagaagttcacagagctcttcacagcgctctctgtttctttcgatgatcttgacattcatccccagattacacaactggcttgccagatagtaggccactctccccccaccgcagatcattgcatttttaatcttctcttttcgcagagcgatcttcttgaagaactgctccatattctgatgagaagccgcaatatgcaacttgtctcctgcttttaaaatataatctccatccggaatcaaaaccgtttctccggattcgactgcacataccagcacctgaacctgaaaacgtgcatataattcagacaaagacaatccttccagttttccgcagtgaatcggaaattcaacaagttccacccttccttttacgaaagtctctaccttacttgcatccggaaacagcagcagacgggtaatatcccccgcaacgatcagttccggatttactaccatactcaaatggaggtcctttttcagaaaatcaatctgtttatagtagatcggatttcttacccgggcaatcgtatgccgtgcgcccagccttctcgcgatcagacagctgagcatattgcactcgtccgtagaagtgcaggcaatcaccagatctgcatgcggtacatccgccctctgctgaacctccacactgccgccttctcccacaacacaaaaaacatccattctttcaatggattttcgcagtttttcttcattattatcgatcaatataatatcgtacttttctgatgacagttgttttgccagtttataaccaaccttgccgtcgcctatgattacaattttcattggtcccctaagtcctctctgttttcacattcttcttttcaaaacgtgttctattataccaccttaataccttacacacaattttaatactatttttatattttttccacgttttgcataatttttttctgttttctccaccaaaaaagacctttcctacaacaaaatcattgatttttgcagaaaaggtctttttctaattctctattctatttttcttccgctgctcttgctacgatttccttctcctgtacatccgaaggtgcctgctcatatcttgcaaactgatactcataagtacctcttcctcctgtcgtggagcgaagcactgtacagtatccaaacagtcctgtcatcggaatgtctgcttctatgatctgtttgccgccgcttacaggtgtcatgccaaggacacgtcctcttctcttattcagatcacccataacatctcctgtatagtcatccggcactgtcactttcaaggatgcgataggctccagaagaaccggtcccgcttccataaaacctttcttaaatgcctgaatcgtagctgtcttgaatgccatctccgaagaatctaccggatggtaagatccatcgtaaagaactgctttgactccgactaccggatatcctgcgagaggaccttttaccacagagtcctgaagtcctttttctacagccgggaagtagttcttcggaacagcgccgcctaccacttcttcttcaaatacataaggagtctccaaatcaccggatggttcaaaccgcatctttacatgtccgtactgaccatgtccgccggactgttttttgtattttgtgtccacatccgatttcttacggattgtctcacggaacgccactttcggtgtctccagtttaatttctactttatatctggctgccagtttgctggctgcgatttccagatgctgatctcccataccgtaaagaagagactgtctgttctcactgtcattgactgctctgagtgtcacatcctctgccatcatcttctgcagtgcctgagataccttgtcttcatccccttttgtcagagtcttgtatctcatataggtatatggaaccgaataatctgttctggaatatgtaatcggcgtattctttgtcgaaagagtatctcctgtctttgtacttccaagctttgcgattgctccgatatctcctgcaaacagttcggaaacttctgtcggtttgtttccgcacatcgtataaagcttgcccggtttttcctcggcatccgcatctgcattgtaaagtacgtcatcccctttgagtacaccggagcatacctttacaaatgaatattttccgataaaaggatccaccatcgtcttaaatacatatgcagatttggcttttgcaaaatcgtaatctgcctcgtagatctcactctttgttctgtggatacctgcacagcttctcttgtccggactcgggaagaagcgcacaatatcagaaagcagattggcaacaccctgtgcctgtatgttcgatcccatcgcaaccggaacgatgtccccatccatcacttccgtgcgcatggcagcacgaatctcctctattgaaaattcgtccccctcaaagtaacgatccataaattcttcgcttgtctctgcaaccgcttccatcagagaatctcttaaaatcttcaagttcggaagacaatactccggaatctcacactcttctctctgaccgattcctgtatagcgtctgccggcatttttaataatgttgatatatccgaccagtttttcattctcacggatcggctggaaatgtggtgcgatcttctttccatatctggctgtcagatcttccacaacctgacgaaaacttgcatcgtccatatccatctctgtcacatagaccatacgcggcaggttgtacttgtcacaaagctcccacgctttttctgtaccaacctgtacaccggcttttccggaaaccacgataactgccgcatctgctgcactcactgcttcttctacttcgccgacaaaatcaaaatatcccggtgtatccagaatattgatctttgccttttcccactcgatcggaatcaggctcgtgctgatcgagaatccgcgcttctgctcttctttatcaaaatcgctggtcgtattggactcggaaatctttcccatacgactgactgctcctgatacataaagcatcgcctctgcaagacttgttttgccgctgccaccgtggccaagcaatactacgtttctaatctcatccgttctgtaaaccttcatagtgctgcctccttatgttgttattctcttcatgttccggcagctgttctgccgactcacgtactatgtgtatattgtactaaaattttatataaattacaactattttatttatttttaacaacttgttttcaatttacttttacgagttaaaatgctaaaatattctatatgtgcttcttgggattgcagcttcccatcagccagtttatttagaaaggacatcaaactatgcagacaaaaacaagcactaccatcggatttatcgggctgggactgatcggcggttctatcgccaaggcaatccgccagtattatccggactatcagatcctggcttttgataaaagcagagaaacacttgcactggccatgcaggacggaacgatcgacatctcctgtactgccattgacgaacagttctctcactgttcctatctttttctctgtgcgccgatttcttacaataatgcgtatttatctcagttaaaggatttgatccatccggattgcatcctgacagatgtcggcagtgtaaagactgcgatccatgaggagattacccggcttggtctggatgcaaatttcatcggaggacatcctatggcaggttccgaaaaaagcggatttgccaattccaaggctcatctgattgaaaatgcatactacatcctgacgccgtctgacaaagtctcttctgagaagctggaagattaccgctgctttgtacagtctctgaaggcgctaccgatcgtgcttgactaccggctgcatgatacggtcaccggaactatcagtcatctgccgcacatcattgcctcctgcctggtcaacttcgtaaaaagtacggatacgaaagaggaactgatgaagcttctggctgcgggcggttttaaagatattacaaggattgcatcttcttctccgatcatgtggcagcagatctgcctgaaaaataaagataatatctcccggatcctggacgcttatatcgaagaactgaaccgcgcaaaaatttccattgatgccggcaatgaacgggaattattttcattcttcgagtcatccagagactaccggaattccatgccggatcactctgcaggaccgatcaaaaagatttttgccctgtactgtgacattatcgatgaagccggaggaatcgcgaccattgccacgattctggccagcaatcacatcagcattaaaaatattggaatcattcataaccgggaatttgaagaaggggtactgcgcatcgaattttacgaagaggacgcctctgtaaaggccgccgcacttctgcagaaataccggtatattgtatatgaagtttaaagaaaggaatctatgattatggaattgacaagcattacaggattaaaaggagaagtttccattccgggagacaaatccatttctcaccgcagtgtgatgttcgcatctctcgccaacggaatgacagagatccacaacttcctaagtggtgcagactgtcttgccactattgactgcttccggaaaatggggattaaaatagaggaacaccaaaaccggattctggtacacggcaagggactgcacggactgactgcgccttcggaaacattacaggtaaaaaacagcggaacgactacccgcctgctctccggtattcttgcaggacagccattttccacttccctttccggagacgagtcactcaactcacgtcccatgaaacggatcatcgaaccactgacacagatgggcgctcatatttccagcctgcacggcaatggatgcgcaccgctggtcattgaaccagggaaattgcacggaatccactacacgtcaccggttgcttctgctcaggtaaaatcctgtattcttcttgcgggcctttacgcagatggggaaacttccgtgacagaaccgatcttgtcccgcaatcacacggagttgatgctcaaagaattcggcgcagatatccggaccgttcatcagctggcaggttctgaggcaacgtccgtgatccagccatgtccggaattacatggacagaagatcactgttcccggagatatttcttccgctgcctactttatcgcagcaggacttttagttccggattccgagattctggtcaaaaatgtaggaatcaacccgactcgtgcaggtcttttgaaagtatgcgaagatatgggcggagacatcactctgttaaatgaacgcacggaagccggagaaaaaatggccgatattctggttcgcagcagccagcttcatggaatttcgattcacggtgatatcattcccacactgatcgatgagattccgatcattgccgttatggcagcctgcgctgaaggtacgaccatcatccgcgatgcgcaggaacttcgtgtcaaagagacagaccggatcgagacgatcactgacaatctgatcgccatgggatgcagcgttctcccgacagaagatggaatggtgatcaaaggaggggagcctttaaaaggcgctaccatccacacactgctcgatcaccggatcgccatggcattcagtatcgcagctcttgtagctgacggacgcacgaaaattctggacagtcactgtattgacgtttcctatccgggattttatgatgcatttgaacatcttttataaaaaaacgagggcacttcatccaaccaagacgaagtgccctttctcaatattgtatattcttttgacggatcagattaaatttgatgatttccgtgttaaaatattcattcgcatagaccagtggtttatctttctcactgtaatttaatgtcttcaggtaaagatatggacttaaacccagttctttcacagatacatatttttttaatcctgcaatttctgccggattcactgtatcgatctcaactttatcccattgcgccttttccccggacaattcataaatatatttgtaaatcgaatcttcatactttgaaaacatatcaaatgcctcttccccgccgatcagattcattccgaaataatctctgcagaatgcacagatcttatcgtctgccagaaacagcttttctgccactaccagctgttcgtccggctgcatctgaagaagagaacagatttcttcctcccgttttactttttgaatatttaaaagtctgacggaaggagcatacccgctctttttgatcatctgcgtcaattccatacagggactgaacgtgaccttgatattgagagaatccacattgacaaatgtaccccttccctgtctgcggaaaataatcccctctgccgcaagatcattcaatgcctgacggattgtgatccggctcactccaagcatctcggcaagtgcctcttctcttggaagcttattgtctgtttttagatccatctcttctatatattgaagaatggcctcctttgcctgtccggacaaggattttacacgtaatttctgcgtactcaaagcgattcctctctttctcttaacctatgtatgatgatagaagaatcccttttctttgtcaagaaaaagcttttttcccattcaagatcagattcagaaaaatcgcgctgatgctgaccataaacagaccattgcttaataccatctgcaatgcattcggaatattcacaaaaacatctgatgcaaatgctgcgcctactccgatcgcaatgctggtccctacaatcttgaaattgttatcttttgaaaaatccagtttggataaaatggaaattccagaagaagtgatcaccccgaacaatgccagtgttgcacctcccagcacacatttaggaacagccgtaaataccgcggaaatcttcgggaaaattcctgccagaatgatcataatgccagctgctgcaacaacggatctgcttttaacttttgtcagtccgatcagacttacattttcattgaacatggtagatggaaccgaattgaacatcccagtcaccatctgtgctgctgcctgacctctgattcctctctcctttgtcttattatctgtctggattccaacaatttcatccattacagaaaagactccgatacactggatcatgttgatgatgcagaaaatactcataataaaaatcggccatattttaaactccggcattccataataaaatggtttcaccggctggaatacttctgcctgcgcgattgatgtgaaatcgaccatgtgcagaccacatcccacgatcgttcccgccacgattccgagcaacagggacatacttttccagattccttttgcatacttttctaccagaatgataaagatcaaaactgcagtgcccagaatcagattttcaacagacccaaagctttcgctgccttctccgcctgccagatcccgcagtgcagtcggcgccagtgtaattccgatcaacgttacaaatgttcccactacaacctgagggaaaagttttaaaatctgatccataaaaaaagacaggataaaaattatcgcaccggatgcgatcactgcgccaaagagtgtctgcatcccatattcttttccgatcaggatcatagggcttagaggtgcaaaagaagaacccaaaataatgggatatttggatcctgccagttttccgattccgatcacctgaatcagaatggcaattccacttgtaaaaaaattggctgctactaaaaatgcagtttctttttcccccagtcccagggctcctgctaaaatcaagggaaccgcgattgttcccggacacatggtaaggacatgctgaaatccgatcagcagcgtctttgtccatcctactttttcatcaaaatattccgctttcatactctgctcctgactgaaacttaatcccaatatccctcatgcacctttgctgcttctacttcaacggcctctaccggtcctactacttcaattgctttctgcccttttgcaaatacatctctgcatggaagatcaaaagtcgggttctgctcattacttcctgtcagctccaacagtcgtctctctgtcattccgtatacaactcttccgatattcgcccagtaaatagctcctgcgcacatcgcacatggctctgcagtcgtatataatgtacaatcccacaaaaactctctggaatattcatgagatgctcttgctgcaagtgtcgcttccgcgtgccctgtacagattttctctgtaatctcaatatttccctgctccatgatgatctctccctctttgttgaccagaagggctccaaacggagtatttcctgcttctcttgcctcttttgaaatttcaatcgctcttctcaaataaaattcgtgactctgatacatcttctcttctccttataaaatattatgtaataggtattaccttttgttgttttcaatataacacacatctttttatttgtaaagaatcagttcaaaaatttgtaaaaaaggatgccgcaaaatctctttgcgacaccctctgtaattcttaaaaaacatttccaaataaggctataaacatcactccaatcgttccgattgcaataaaactcaaagatagcgcagcccgcctcttgcgggaatcaaattccactctggcagcatctgtcatattggacacatatcgatttctgccaatcaaatataaaatcagtccgcctccaccctgatttccggaaagtgaaaacattccccataatttcggatgcttcaaccctctgctctctgcatcaagagctaccagtttaaatatctgataggataatgtcagtccgccaagcaaaaccataaatacaaatataattgcaaaaataagcattttccattcctcctaaagtttctttatgatctgataaaatagcatacaagttgctgtaatgccaagaatcgagctgcccatgatcagataatgattctcaatgatcaaaccattaaataatataaacaagatcatcaacaatacattggcaataatcgcagcaatcaatttctcattactttttacaatgtttgtacttttttccaaatgttctatcattgcttcatctcctttcaataattgatcaaggctgatgttatacaggtcactcaatttgatcacattcacaatatccggaaaagatttttcattttcccagtttgaaattgtctggcgggagacctgaattttttctgcaacattctcctgtgtcaatccactcttgatccttgcttcttttaattttacacctatttccataacatccgtcctttcctctgcactatcgcagatttctcctgatttgtctatcaaatatcctgtacatccacaaaatatctttgtcaaaatctttttacataccttatatagtattatatttttctgtttactgccagatgtttgtgattcatttaaaaaaaacagccggattttacccgactgttttctctttaattcttttatactgacaaataaatcctatcgaatttccacaacggtataatctttctcttccactgcctttttcagtacttcatcagaaaccgccgagcgcagtgtcaccaccgctgtgcctttctcatggcttacttctgccgcttccacctctgcaagtgcctccagtgctttctttacaaacgcctcgcagtgtccacacatcattccttcaattttcattgttttttccattgtcatttcctcctgtttctttcttgtttttatttttcgatctcttgtggcgtccttcatacggaaccaattgagacgaagtgcattggtaacaacacaaacgctggacaaactcattgccgccgctccgaacatcggatttaatttccatccaaacaatggataccagattccggccgccagcgggattccgatgacattataaataaatgcccagaataaattctcatgaatgttgcgaagtgtcgcacgactcagtcggatggctgccggaacatccgtaagcctgctcttcatcaataccacatctgcggcatcgatcgcaatatccgttcctgctccgatggcaattcccatatctgctcttgtcagtgcaggtgcatcattgatgccgtctccgaccatggctacttttcccacttttttcaatttgcggatgactgcctcttttccttccggaagtacgcctgcgatcacctcgtccacaccggcctgcgctccgatggcacgggctgtctgttcattgtcacctgtaagcatgaccacccggattcccatattctgcagttcctgcactgcctggggactgtcttctttgatcacatctgcaactgcaatgattccaagaagctgatcttcttttgcaaaaaagagtggggtttttccctgatctgccagcccttttgcctttgcctgcatatcttctgaaactgcgcaagtctttcggatgaatgataaatttcctccccaaagtcgttctccatcacaccagccggacagaccatttcccggaactacctgaaatcctgtcatttccacgctctctgtcagcttttgttcttctgcatacgtcatcaccgcttttgccagcggatgctcacttttctgttccagggcatatgcggtctgtaataattctccctgccggattccttccgccgttacgatatctgtaacgttcggttctccgcttgtgatcgtcccggtcttgtccaatgccacgatctgtacctttcctgtttcttccagcgacacagcagtcttaaacatcacaccgttttttgcgccttttccgcttcccaccatgattgcaacgggagttgccagcccaagtgcacaaggacaactgatcaccagaacagaaattcctcttgcgagtgcaaatccgacactttctcctgccaatatccataccacaaatgtaatcgccgcgatcaccatgactgcagggacgaaaattccggatacccgatccgccacttttgcaatgggtgctttggtagccgctgcatcactgaccatctggataatctgagataatgtcgtatcttcccctactctggatgcctcacaccggagatatccggactgattcaacgtagcagctgataccatgtctcctgcttttttatccaccggaatactttctcctgtcagcgcagattcatcaatcgcgctgcttccttccagaacaataccatctacgggtatatgctcaccgggacggacaacaaaaatatctccctttttcacctgttcgacaggaactgtctgttctgttttgtcacgaagcaccaccgccgtctttggcgccagtcgcatcagaccttttaaggcatctgtagtctttcctttggaacgtgcctccagcatctttcctacggtaatcaacgtcaggatcatggctgcagattcaaaataaaattcatgcatatagttcattactccggtcatatcctgacgcatctgcgcatctgtcatggcaaacagcgcataagtgctatatccaaaagaagcgccggctcccaacgccaccagcgtatccatattcggcgctccatgcagcagactctgaaatccactgacaaaaaacttctgattgatgatcatcacacatcctgtcagcaaaagctgcaaaattcccattgccacatgattctctgccagaatcccgggaagcggccagttccacatcatatgccccatggaaagatacatcagcggcaccagaaacacaaacgacaagatcagccgcttttttaagactggtgtctccctgtctttcagaaattcctcttctgcatgttctgtccgctttacggtattttctccttttacagaagctgaatatcccgccttttccactgctgcaagaatatctgcttctttcgcatctccctccacgcccatggaattggtcaggaggctgactgaacacgaggtcactccctcaactttggacactgctttttccactcttgtgctgcacgccgcgcagctcattccgttcacattgtattgcttcatgatatcacctccccttatcgcatcaacttttgcagtgttgtcaccaattcttcaatggtctcttcctttccctgacggatgtcttccgctacacaggtacggatatgattccctaataatactttattgaaactgttcaacgctgcattgactgcagagacctgaatcaaaatatcagtacaataggtgccgttttccaccatttttttaattcctctcacctgaccttcaatccggttcagacggttgatgagatctttgtattctttttctgtacgttcttttgtcttatttgtatgacagcagcactctcttatttcttccatttctttcaccccatttcatatattgattgtatacccttgtggggtatatttcaagtggatttttatggaatttttatacgataaaaagttgaggaaagaaccgtttctgattcttccctcaacttttttactctgttattcataatctctgacaaggaacatcggcttgatcgccatgacctcatcgtattcttcctgctcaagctccacactggaattcattgctttcaaatcctgcttcagcaattccagagcttctgccacacaccgtgtccgttcttgggcaataatatcaatcattcttcgaagtactgccggatgtgcataacacgccggaagaggaaacttcggatattctgcaatgtagcgatacatcgcttctgtcgccttcttcagcctgtcttccacataccgcctgttattgcgggcagtaggaagaacattcgcactggagaagaaaaagatggcggccagtccgaacagcagaaaataaattccgaatcctgcttttgtgactagcgcataaatcccgtaaaccagtgccgcaatccccatcagggtaatgaaaagcgctgcccatttataagcaggattgctcttatcataggttctttttctcttcgcacagctgctcagttcccgatataactcaggtcttttttccaaaaactgcgcacatttttctaaccattggatttcttcccgcgcatccgaaaaagcgatccttgcttttttctgttcaagtatccgctgtttctccagcagttttttttctgcctgcacgctgtgcaccggcatctcgggacggatacttcggatatggtcaagcagtgcatctacctgctcttctcttttgaaaatacactgcttttcctctccgccgtcatactgcacgaccagatatggaatcgtggcaaacattccttttcccgaaaaaccgcctttactcatggctactcttttaaatactcttgataccgagtccagagctacataatatcttctgtcaaagtaaaagctgttcagataaagagccttttgacccactccacaggggccgaatctcctgcagttctttttatccgcttccagctcccgctcttctattttctgtctgcccagctgctttggtttccatatcatctcgtgtcagtcctttctgtttgtgttttatgaaaacactttattttgctgctttcgcaggttttctcgttgcatacaggaaaatggcaaggaatcctgctgccagaatgatacctgccggatacgcaacagctgttcccagtcccagacattctttcgcatagaagaaatatgtcatggagactgcactcataaaggtagccggaactgctgtcagccagtaattcttcttctcacggaacagatacatacttgctgtccagagaacgatcattgccagtgtctggttggtccagctgaaatatctccagacgatcgtataatccagatgtccgataatggcacctgcacctaacaacggaacacaaagcaacaaacgtttgctgtatttggactgctcgatcttaaaccagtccgccaataccagtcttgcacttctaaatgccgtatctccagatgtgatcgggcatacgataacaccgatcatcgccagtgcaactccgattcctcccattgtctttgagcagacatcataaatcgctgctgactggccatttgcgagaatcgcgcttaatcctgtactcagaccgcctgtcacttcatacaatgcgcatcctgcagcagcccagatcagtgcgatcacaccttccgtcaccatagctccataaaatacaaaatgtccctgacgctctgatttcatacaacgtgccatcagcggtgactgtgtagaatggaatccggaaatcgctccgcaggcaactgtgataaacataacgctccagatcggcgcaccgtccggatgcatattggagaagttattccagatttccgggatcacaaactcggaatgtgtaaagattccaatgataactcctaccgccataatgatcaggcagattccgaatagcggataaatccgtccgatgatcttatcaatagaaataaatgttgcgataaaatagtatgccagaatgatccagagccagaattctgtactggcaagaattccgccgattccgccctccttgaacaatgtcacgatcagacctgcaggtccgactgcaaacacagttccgaccataaccagcagaaccacactgaatacacgcatcacatttttcattgcatttccaaggtaaataccacaaacctctgaaattgatgtaccattatttctttcagaaagcatacctgaaaagtaatcatggacaccgcctgcaaagatcgtaccaaatgtgatccataaaaatacgatcggtccccacagagctccctgcatggcaccaaagatcggtcccagaccggcaatgtttaaaagctgcactaaaaagagcttccactgcggcattaccacgtaatccacaccgtcattaattttgacagcaggcgtctccctgtcatccggtgcaaatgtgttttctacgatcttcccgtagacaaaatagcctccgatcaacagaagcagacatagaaagaaactaatcatagaaatccccctccttctctttagagaattttaataagtttatttttcttttataattatatgtttattttaaacaattttcaatagtttctttctactttttattacatttttcacattttcaaacccggaattttttcttaatctcccgaacgaacgattttccacgaaaaactacgattccggccagcaacagaatgctgattcctgtacaaagtaaagacggataccgaatccggactgcccctgctgccagaagaattcccggaatacatccaaaggcgccgatctgaacaagataaaacaaatattcgttttcctctagcctgcacacccttgcgaccactgtcattgctgcaagaatgaccagagatgcaagcgggagcacaaaatccactgcccatccatgccatccggtaaaaacgtcccacaaaagccccgctgccgatatgagcagaagctgccacattccatttttcagaaggttcctgcgctttttatagcctaccattacaaatagccaggtacaaagtactcccccactcacaaaacctgcccacaaaaatccggaaggaagcatcagattgaccacccagctgatcacaaccgcagcaatacacaaaaacgtaaaaatctgcatactcttctgcatcagtcccagcttcttttcctgatatccggggaagtcattctcttgttctgtaacgtgaatcccttcctcttttaagatccgcagaaaattccgctggatattatgactcagtattttcgaggtgatccctactctcattttatccccgtaagagcaggagcacatctgcagtttgtccgtacttgtaaaaaatccaaacgaatccacataggtctcaaacacatccggaagctggatttttccgatattggaataaatcgcggaaatacttctcccgccaagcgtcgttccagccagcaaaaacaggtttttaatctccagaggcacggcccgaagcagaggatttttttccagacggacaagccggttcatattgtctgcaatccgctcttttacaagttctgttcgaaaaacatgctgcagattctgcaaaacttcctcaaatctcgtattttcttcaaacacctgaccagcttcaatccaaccaaaaaagttcgtcatggaataggagggaaaataatttctcagattcaccggcaccatcagcgtgaccggctttttcatctgacttctcggcatctcctcgtgaatcgcacaaagcagtgcggcagagagaaataccgtgactgacaccccgtatgattttgcctttctgtatacttctttcgcggaaagaaccacctctaaaacagacatctcctcctgctccagcctttcccccttcagctggaatgcaggtctgctctttttgacactgccataatctgattttgaataatactgcgaaaagctgtcttcttcgtgatcactggctgtggaaatctcttcttctgaaacaggcggaaactccacctgtggataacaaatcatcaggtaattccgcaccaattcttttaaaaaattcagcgctcccgtcccatcagtcagacaatgaaacacttccagatttattttctttttataataagaaacctcaaacagaaagcttttctgatcaggcacatacagtccgctgcagggcggccgatcttctgccttgacttttggttttaaattccgctgctccatatagaaccagaacagccctttcctgagaaccgaacaatacagcggatacttttccagcgtacattccactgctttttgcagaacttcctctatgacatcctctttcagttcacaatacagccggaataccctggtatctttcttcccggttgctgccggaaatgcctgtgctgcattgtccagctttctccactgtgaacgtttctttttctgcatcgttacccctcccgtaaaaaatggtcaatatacgcaaaactctcttccacatgaagtcttgaaactccaagtgcaaaatacccgtgaaatgcccctgcgatccgatagcacgtcaccttatttccggcttctttcagtcttttggcataatcctcgccctcatctctaagcggatcaaactctgcactcagcaccagcgtttccggcatatttgtcaaatcttctgcaagaacaggcgccacatacggactttttaaatcctcctgcttcccgatataaagctgcagataatcatgcatctttcctctggtaagcagatatccttctccgttctcccgaatcgaatcatatgcagaatccaatgtgtagcagttgttcactgccggatagaccaaaatttgcttatgaattgaaaattcccctcggtctcttgccagcagacacaaggctgccgccagatttcctccggagctgtctcccataacagaaatctgtcccggctcaatctttggaaaaattttcccctgatacagtgcccttgcagccaggtaacaatcctcaagccctgccggaaacggatactccggtgccaggcgatattctacagatatgacggtcttgtcaacagattttgatagcatactgcagattctgtcatatgtttctacactctctgtagaccatcctcctccatggataaaaaaaatcgcggaggaaatctcttctttctgcctttttgtctcttctgatgggaaatataatctcaaaggagtctttccacactctgtttttatcacaatatcttctttctccacccagagatgaagcggatctaatttttttagatttgccagctttctggctgtatttatctcaatattctggtttgaaaatgctgccagaactgtctgtattacctgattcataaattgccattctccgttactgtatgaacagtcactattctcctgttgtatttctgaacttttattatagcacagaaaaaggcgaatgccatcctgactttcgccatggacagcatccgccgtcattttttctgaccagatacaagcttactctccgagaaaataatgtccgtacgcatctgccgccttgatcgcatctgccactttcttcggtgtcacttcaaacggcatattgtgcagagtatctgtctcggcacaggctgcctctgccactttcatcaactgttcttccgtaatcttacctgctcccagctgttccagtgtaaccggaagtccacattcgatgcagaaatcgatcacctgctgcagctcttctgacgggatgttctcaagcaccagctgtgtgatcgttccaaatgccactttctctccatggtacatatgatgacattcttcgagtactgtcagaccattgtgaatcgcatgtgctcctgcaagaccgccgctttcaaagccaattccggacagcagtgtatttgcctcgatcactttttccactgcttctgtacaggcacctgcttccagtgcaagcttcgccttcacaccttcctccatcagcgtatcaaaacacaattttgcaagagccatagctgccccggtaatctttccgcctgcacaggatgcggcatctgatctctgacacgctcttgcttcaaaataagttgcaagtgcatctcccattccggcaacggtaaggcgaaccggtgattctgcaataatctctgtatccatcatgaccatatccggattggacggcaggaacaaatactcctcaaacacaccttcttctgtataaattacagaaagtgcgctgcacggtgcatctgtagatgcgatcgtcggacagatcagaaccggcgtcttttcataatatgccactgcctttgcagtatcaaaaatcttacctccgccgataccgatcacgacatcacacgcttcttttttcacgatttctccaagacgtttgatttcttttttactgcattcaccattgaagtaatcaaaaacatatccacattcttttccttcaaagcttttctccaccattgctccgattcgcttgtatccacccttgctgatcaggatcagagccttctttccataattctgagcatattctcctagttttttcatctctcctgcgccctgcacatattttcccgggctgatcaatacctttgccattgtcaattcctcctgtcatcatttgctgtaattcttttgttaatattttatcactaaatgcagtggaacggctactgtttttttatatttttctgttgccagtacatcactatggccaaataattttcttccattcggtatttgaatgaactataatgataatatgaatgattttgtggttatcagatgaaaatcggagagccgattcaatagatttcagtttctatgtaagcaattccgtggaaacctgacccacaaataacatgatttgatttttcagaaaaggagacaacttatgaacatccacccactgatcccagaggattatcctgtgatcgattcttatatgcaggagcttcacgaccttcatgttcagggacgccctgatttatttattcctgcaagtcacatttattcagaagccgacttccgtgaaataacaaccgacggcaatcacatagctcttgcaatgacagatgaccattttatcgccggttttatcattgcttcgctccggaccaaaagcaatatggtgaccggaacactcatcgcatatgtagatgatatgtttgtacacccttcttaccgtggtcagaaaatcgcaacgactctttttcatgaaatggaacaaaaagcaaaagaactcggagccacaagaatcgatctgatggtatgggaattcaatgaatctgcacaggaattataccggtcactgggtatgaccccgcagaggtatattttagaaaaattactgtaatcaggagtaaatcactcctgatacaaaaactttacagactcatatatttcggaaaaatcaatctcacattccccttggaatattcccacaggtacacgattttcaaatccatagacaaccggaagttcttcattttccagatcatacactacaacttttttcttatccgggtcgataagccagtattccctgactcccgctgccgcatatttgctatgtttgatattcatatcaatttttcttgtagcaggggacaagatttccataatcagatccggagctccatacacatgtgtcggaactattttctcacagtcacataccaccaaaacgtccggctgtaccattgtcttttcatcacaatcaagctgtacatctaccggtgcagaaaaaaccatgcatgctcccttcttttggctgatgaaagcatgaagccgtacactgatttccaagctgatcttctgatgaataattgtaggcgcagacatatcatagatcacaccatcaatcaactctgctcgtctttcatccggaagttgatagtaatcctcaagagtacactctcgacttttttttgatattccatattccatcttcgattcgcacacataagaaaagcccctatcagagtctcttttattctcaaatacagattctatttgtttcagtatatccgggctgaatacttcctcattgtcatggaaaatcttttgcaccgtttccaaagagactcctgatagctccgatagctgctcacaactatagccaaactgctgtctttttcgcctcatttgttcgactgtcacatgatcacctcatttgcatagattccaacaagttttattattttcattatactgataaaacagaaaaagctcaatcgtttctaaattgtaaatgccaacaacataatcccgtaagatttcagcgatatttctccagatattcccggaccttacgcaccgtcttcgggctcttcccaccggaattcatcccgatcacaacaccgtctttttcagtcactgcaggaaagaaaaaatcacacagggatttgtcatctgccgtatttaccagaatcttacgcattctgcacgcacttacgattttttgattcagctctcggtcatcggtcgcagtcagcacaatgtctgccccgttcaaaaaatcagatgtatctttcagatcttcttccaaaacttttcgagaactccacactgcctgaggcacttcctttttttcctcttctttcagaatgtccttcatttcatcacagatctcaggcgctgtcacctcaatgtgccctgcaaattttaacagcgtacgtacccttcttgccgcaattttccccccgccgatcacaagaatcctctttgtcgaaatatccacaaacatcggaaaataatatccgcccatgctcttctctccctcgtcacttcttttcatccatcatatacaacaacgcattgcagatacatgctgcgatattacttccgccttttcgtcctcttgccacgatatacggtgtgtcgttcagcgacaggatcagttcttttgactgtaccacattgacaaaccccaccggcactccaatgatcagctcgggttttaatcttccttcctgaatcatctcatacaaccggatcagcgcagtcggcgcattgccaatggcaaagatcagttttttatccagcttggccgcacgctccatgctggcaaccgcgcgcgttgttccctgttcttttgccatgtttgcagtctcttcgtcagacataaaacagcacacttcgcctccgtactgtgccagttttttcttgttgatccctgattttcccatctgcgtatcggtcacgatccacgctccgtcacggattgcatccattgccctttgaactgcgttttctgaaaatttcagactctttgcatactcaaaatctgcgcttgtatgaatacagcgctttacgatcggttctgttcccggaatcagactgacctctcccagctcttctgtaatgatctcaaaacttcttttttcaatctcctgcggcaatacattttccaactctgtcttcatctttctgttctccttctcacttgatcctggtcccgatcccgcactgtacccgatctacccggtctgcacaggctgcaagatttgtacagattcttcccacagcttccctgtactgtctttcaaacgcatccaccggaaccaagccgtatccgacttccgcagtcactacgatcagatccggattttcctgtaaaatctgctctgccagatccgttgcatgctctgctttgttttcccggatccagcgccttacaaattcttcaaaatgaacaattcccgaacaggaaaaaatgtctttcaggtcgcaggatgccccgtcactccacacaaagtttggatatgcctgttttgcatagtctgttttcccctgataagctcctccgattaccattttcatccctttttcacctccaccggtattccataaacaacttctgtcacctgatctgccatttttgccagccggcagttgattgttcccagtacgcttaagtattcctgcatttcttcgtcagccggaggcagatcacaaaacacttcatttgtgactgccacaagtccccggcagcgtttttctaattcccggattccttccagaacggcttccctggtccgttcttttgcacctgtatccagatacaactcatttgcagtcagattcgacatgcattccagaagtacacagattccctcttctgccgcatccgcgcgaaaccccggctcggtctgaaccagcttcttaaggtctgtaaaacattccaacgtctcaaatccttttccatttcgcatctgtctgtgacgcaggatcttttgttctgtctctttcccataagggaccatggttgcaatataatacagatgacgggaatttgtcttttttttgagcatacagatctgttcttctgcatatgcggatttcccgctcccgcttccgcctgtcactacgtgaaacattttagtctcctttcacatctgcataccggtattccagtgctccggttgccggaatctgactcactcctgtgatatccggccgaatcagattacagcttttcatggaaaacaaaggaatgatataaaactgctctcccactgcccactgctctgcctcgtgaagcagtgcatttcgttttacaggatccgtttccacatccgaggcttctaccagacggtcgtatttttcatcccggactccactgcagttatacgttccatttgacagaagcatggacaagtaggtgtacggatctgcaaaatctgccgtccagttcatccggcaaagatcaaagttcccggctcttctggtcgcataattggtctgtaattcctgcgcctccagcttgatctctatattcagattctgcttgagctgctcctggatcacctgagccgtatctgcatctaattccagagacggatatttgtaggtcaaaacaggaaatcctttcccgtccggatatcccgcctgagagagcagctctcttgccttttccacattttcctcaaacggtggatctgcctcttccacaaaatactctccggtcgtattatttttcatacgctttgccacgaaattcacagtcggctctgtgtcttctcctaccattttacaaagatcttcccggttgatggcaagactgatcgcctcccgcacacgcacatcatccagaggcttcacatccagattcggataaatatagcgcgtcgcgatattgtctgtcactaccagatcgtctttcccctgatacagttccatgacgacagaaggaagggagactgccacatcgacctctttggtctcataagcacttaacattgcctgctgttcttcaaaaaagcgataggtgatccgctccagatgcaccgcatctgcattccagtaacgctcattctttttcaggacaaaatattgctccggtacatattcttccagataaaacggtccgtttgacagactggtctctggatttttatcccatccgctgcccgtctcttccgcatatttactgcaggacggtgtgtagaccggaagacgcaaaagctccagaaaatacacacacggcttactcaaatgaaagatcagagtattttcatccggtgtctcaacaccaagactctccatatcggccgttccttcataaatttcctctgcatgttcgatcggaaacagatagttcgcatatccacttccacttttaggatccagcgcccgcacaatggtattcttaaagtcagccgaagtcactggtgttccgtccgaccagcaggccccttctcttaaatgaaatgtccattctgtagaatcctcattcacctcataggactgtgccgcccggcattcgatttctccattttcatcaaatgtcagcagttcgtccagagctgtgaccgaataggaaagataggtcagtgcaatatttcccgccggatccatccctcctgtttcactgtttactgcaatcgtaatttctttttttgtacgtgcttctgtctccttctgctccgaagcattgcaccctgttatcatgcctgccagaatgcagatacacatgacaatcgctgtcatttttttcttcatgctcttctccattctcttctgttctcaaatctgagaagtcatatggtaatcctttgcacgctttttggtatgcgcttccgaatacaaaaagcacctcacttctctttcaccaaaccgatagcttccaggtttttctttgtggcagcactccattgcataccggcatctcggtgcatatggacaaccgttttctgtatcctgagagcgatttctcgtttccttcaggatcagtcgtttctgtctggctgctttcttcggatcaagcggcagcattgcccgcagcagttcttttgtatacggatgccacggctcctcgtagatctccgcagtcaatccctgctctaccatacttccaagatacatgacccccatcctctggctgattcgtctgactacctgcagatcatgggaaataaacatataggacagctgtgtctttctctgaatctcttccagaagctccagaagccgagactgcgtaaggatgtcctgcgaagaaaacgattcgtcacagatcaaaagctccggatttaaaagtaatgcccttgccactgcaattctctgacgctgccctccggaaagagccgctgtcgtttttctgacgtcgatcttttccatctgaaccagtccaagcatttctgccacacgtttttcccgctcctttttggagccttttttctggatcaccagaggctcctccaggatccgttccagtgaaaattccggatcaaaggatgccgatgcctcctgaaagatcatctggatctttccttcacaggaaaaactgccgcagctcggaggaatgatccctgtcagcattcttgcaagagtcgtcttcccggatccgctctctcctaccaatccaaaggtctcacccttatgaatctcaaaagacagcggttccaccgcttccagagatctggattttccaaacagggaattttttacaaagcttcttcccagtccctgtgtccttaaaataacttctccggtcttttttttctccggcacctgataaagctttcttgccatgtccgagagttttttcgtataaggatgtgccggttcataaaaaatctgctccatacttccctcttctacgatccgcccctctttcatcaccagcaccctgctgcacatggaggcgatcacacccagatcatggctgaccaatacgatggctgtatgcgtctcttctgcaatttttttcaacagatcgaggatctgtctctgtacggtcacatccagcgctgtggtcggctcatctgcaatgatcagatccggattacatgcaagtgcgatcgcgattgccaccctctgcttcattccgccggaaagctcaaacggatactgcttcattctctgcccgggatcttgaattcccacttcatccagaagtgtttctgcccgctctctggcttcttttccggtacacctctgatgtgccaaaatggtctctgtgagctgctttcccacacggaccagcggatttaaagatgccgaagcatcctgaaagatcattgcttttgtcccgtgctgcttcaatttttcgctggtgatctgtacctgttccggcaaaatccccatcaatgccagcatcgccgtgcttttccctgcgccggaagcccctgcgatcccaagcagttctccggattctacctgaaaagataccttgcatgccagattggcgcttcccggatactgtacggtcagattttctacttctaacagcttcatcttacattccttcccttcttctgcggatttttgcttccagtcctgccccgatcagattcagcgacagtatcaggatgcacagcactgctgtcggaatcagcatctgatacggatgcacgaagatctggcttctggctgcctggatcatggtgccaagactggctcctggcgccggaatcccgactcccataaagctcaaaaatgcttcggtaaaaatagcctgcggtaccagaaatgtaagacttaccacaatcggtcccgcagcattcggcaaaagatgggtcagaaagatccgaagagggccggctcctgcaagccgggatgccagaacaaactcccgttctttgatccgcatcacttctcctcttacaatgcgcgccgtttcaatccagccggatatacaaagtcccacaaggatacttacctcattcgctcccagtaccatcatgatcaggatcacatacaaaagagacggaaccgatgccacaatatccgcgatccgcatcagaatattatctgcggtttttcccgcatacccggatgccgctccatataaaacacccagcgcgccgtttaaaagtgcacttgcaagtccgacacacaaactgatcctgactccgcaccaaacccgtacaaacagatcccttccaaacttatctgtcccgaaaggatgggagaaggacattccctgactgcggatatccgcatgcatttctgtagatgtccacggtgacagggccggaaccagtactgctaaaaaaatgcagagcaaaagcaggatcagtcccactgttattttttcgttttttctaaaatttatctgcttcattgcttctcctttgcactgctcttactcctcatccacatagcttctgcgcactctcggatcaatgcacgcactaagtaagtccaccgccagctgaatcaggatcacgactgcccccataaagatcgtcagcccgagaatgagtgtataatctcggttcgcaatggaacttacaaactgtctgccaagccccggaatggtaaaaatactctctaccacaaaacttcctgtcagaagaaacgcacttgcaggtcccagataattcagcaccggaatccagatatgcggcagaatgtgcgtaaacaggatctgtctttttttcagtcctttcgttcgcgccagaagtacataatctctttgtttctcctgggcaagaagtgtcccggtcagccgtgccagcgaacaggcgggatacaatgccagagcgcatactgggagaatgtaatttttccaggaatccagtccgctgaccggcagccatttcagccagactccaaatacaagcatcagcaaaattgctgccacaaaattgggaactcctccgatcagaagtgttccggtaaaaagccctccacgaagcagcctgtgtctcgaaaaagtctgccagactccaatcccgattccgacgatcattgccagaagaattgccagaactccgatcaccgcagtcaccggccaggatctttgaatgatatttgcaaccgattcggacggattttgataagaatatcccagatttccgcgaagcagatgcttcatatatgtgacatactgcacccctgccggctgatgtaatccatattcttcctccatcatctgcagcacactctccgacacatttgctccctgaaaaggacttcccggaattgccctggtcagaaaaaatgtaaccgttgccagaacaaacaaggaaaggatccctgtaacaagccgttttcctatgtattttgccactgtatgctctcctctctattcttctgccagctccagaatctttaagaccatgctctccacagatgcttcttctgaaatctgtatctgcattccatatctttttgcctcatttgccgtctgttctccaatgcagacagcccgtatttttgtagtatcgattcccggaagtgcctgtacaaatccacggaccgtggacgcactggtaaatgtcaccagatcaatttctccctgcctctgctgcttctcaattgtttcctttaaagtctcctgcaatttacagatcgtttcatacagaggcacatcttccaccttcaatccggcgtttttcagcggcggaagcagctcttcggatccctgcttcgcccgcagcagtacaatccggctctttggtgctgcttctcttgcgatcgcctcccccagtgccgctgcacagaatgtctgcggcatgacatccgcaaacacgccaaactgttccagttcctttgctgtaccggaaccaatggctgcaacttttacatgaggaagaaatacattgcgtacatccattttcagcattctgagctgtttccagaacgtctgtaccccgatggggctggtaaacacaagccactgctcgctttcctgttctctgatactccccagaattgtcccaagtacttcattgggccagacaggctttgttgtaatagacggcagctcaattacctgtgcccccaattcccgaagccttccggccagcctggaactgttctgcctcgggcgggtggtcagaatctgttttccccacagagggagattctttacccagtcaaatttttcagacaatgtacagacttttcccacaagaatgatcgcaggcgtctgcacctgaaatgtttttgcatcctcccaaagcctggcaagtgtgctgacaagccttctttgtcttgccgtagttcctttttccagcactgctgctggtgtattctcatccattcccgcctggatcagtccacggcatatttcttccatggcagtgatccccatcagaaaaataagcgttccgttcaattttgcaagggcgtcataaggaatctctatttttttgccttcttttgcatgccctgtgatcacatgaaaggaagacgcaaaatcccgatgcgtgatcggaatgcctgcatacgccggaactgcaagagcagaagtcactccggggatgatttcaaacggaatcccttctgccgccagacactccacctcctcggcccctctcccgaatacaaacggatctcctccttttaagcgaaggacattttttcccgctttcgcctcacgaagtaaaatctgattgatctcttcctggcggacacagtgatgtccggaacgttttcccacgtaaatccattcttttccatccgggatcagactcaggatctctgcactgatcagggcatcatagatgatcacatccgcctcatccatccatttttttactttcagtgtcaaaagagaggcgtctcccggtcctgctcccgcaagccatactttgccggatggagatccctttcccgtcttttttttctgctgactttccatatgcgctccttttctattttccatactttttctgcatattgtgtgcaagagtctcccccagcagctctgcttctttcttattgccgcttgtcttttctacaaaccagttctcatctgattctctccagtacagccctgtaatataacactttgatcctctgatttctgcatatgctgccacaggtgaagtacatccgccattcagtacttttacaaaggctcgttctgccttcgccgcggcctcagaccggggatcgttgagcacttctaaaagttcctgatattccccggctcttgcctgcactgccagaattccctgtccggctgccgggatcatttcttcacaggaaaaatatctcccgatacaggaatccattcccagtctttttaatccggctgctgccagaaccgtagcacaaaatccttcttcctccagtttgcgaagtctcgtctgcacgtttccgcggattccctgaaagtgacagtccggatacagtctctccagctgcagtctccgcctcttgctggaagtcccaatcatcccgccggaaatgctttcggcctgtccctgccgaaagatcagcacatctcgcggatcttcccgtttgctatatgcaagaatcggaagatcttccgggatgtccatcggcatatcttttaagctgtgcacagacagatcgacccgtccctttcgcaaagcctgatccagctccttgacaaacaaaccttttcctccgatctgctccagactccggtctaaaatccggtctccggtcgtcttcattgtcacgatctccacacggatatgcggaaaatgcgcctcaatctgtccttttatgagttcggtctgtgtcaccgccagcctgctttccctgcttccgatccgtattactgttttcatggcattctcgttcctttccccagaatctgataaatatactccatatccaaactttcccggataatctccgccagcttattgtactgggtttccttgtatgccttccagtccagacgctcaagctgcccggcatcatatcctttttcttttaaaagtgccgaaacaaacccggatgcgacacaagcctgatcaaaaattccgtgtacatagcagccgtaacagttgttttttctggcgccgtcatatcgaatccgtctttcgcctgtttcctcctgaatctgcaccagcggacaaggctcctcggtatacgttgtcactcccatatggatttcatatccttctaatggcacctgacttaaactgctcagacttccagacagcccttcaaaagttccctgtacgcgggttctcatcttttcccctgcaaacacagtctgtatcggaagcaagcccattcctttgagttccccgcccgcttccacacctttgggatcctgcaaaagctctcccatcatctgatagccgccgcagattccaaatacagtttttccggatgccgcatggcgaaggatctttccttccagtccgcactgacgaagccacttcaagtcttccatcgtgtttttacttccgggaagaatgaccgcatctggagtgccgaactgtgacgcacttgtcacgtaccggacaccgacttcatccatagattctagcggcatcagatctgtaaaattagaaattctcggaagccggatcacggcaatatccagaagccctttcttttctctgtgcgtgaaccgctcgcttaagctgtcttcttcgtcaatatccaggtggaaataaggaacaaccccacataccggaatctttgtcttttcttccagcatatcaagcccgggacgtaagatttctttgtccccgcgaaatttattgatgatcgttcctttgatccttcttctctcctgcttctctaaaagctcaatggttcccacaatctgggcaaacacaccgcctctgtcaatatctccggccagaagcaccggtgcatctaccatctctgccattcccatattcacgatatcttcacgtttcagattaatctccgccgggctgcccgcaccttcgatgacaataatgtcaaactgttcatccagtttctgataggcgcttttgatcaccgggatatattctcttttcctgcgaaaatattccattgctgacatcacaccctgtacttctccgtttaagatcacctgagagccggtgtcattggtcggttttaacaagatcggattcatgatcgcaagaggctcgacacccgctgcctctgcctgcatgacctgagctcttcccatttccagaccttctcttgtaataaaggaattgagcgccatattctgggatttaaaaggcgctacctgatatccgtcctgatgaaatacccggcacagtccgcctgccagaacactttttcctgcatttgacatggttccctgtatcatgatcggtgctgccattctcattctcccccttcataaatatattccaatgctttcagcaatttttcattgtctgttctctgcttcaccgcaatccgataataccccttttccagtccctcataattggagcaatcccgaatcaggatgtttttctgaagcagcagagagaacagcggataggaactctttaagagcagatagttcacttttgaagggaaccactccaccccgatccgggtcagattttcttccagccacgcccgttctgtttccagccattttcgcatttcctgccatcgtttcgtttcctttaaagccgcacacccggctgcctgtgccacaccggacacgctccagggctgccggtttccttccatcttttcaagcaaatccaaattggatgtgatcccgtatccgagccggattcccggaatcgcagaaatctttgtaaaggcctgcagaatcatcagatttttacttctctcacattctctggcaagtgtctgtttttgcggttctgacagaaattccacaaaacactcatccaaaatcatgagaatccctttttcttcacatgtctttaaaatctcaagcagaaagtcctttgggattaccgctccgcttggattatccggagaacataagaagagcagatccacatcttctttcaaaagctccagataagacgtttgcggcacaaacccgtgtttctcactgagcggataatacacacattcacagtccaccgcctgaagcgctctgtgatattctgcaaaagacgggattgtcaggagcgcttttttcgggcgcagggaatgggtcagcaaaaagatcagctctgccgctccatttccaaaaatcagaaattcctggggaacctgcagatgttctgccagcacacttctgagtttccggcttttgctgtccggatactcccctgcatgcttcagactttcctccattgccaaaagcacctcctctcctggtccaaaaggattgaggttgacagagtagtccgtcacattttcataagtataaatatctccgccatgcatatattccatgattttgtctcctttcttaccagaaataccagaaccggatcattcctgcaaacagcagggtaagcaccgctgtcacatacatcagccttcctgcccgtttgatgtcttcggcctcgacaggacggatcggatctccgatcgtctcttttttatgcagtaccccaaaataccatgcatctcctgccagctgcacctgaagcgcccctgcacagactgattccgtctgcgcagaattcggactggcatgctttctccggtctcttttataaatctgcgctgccttttttgcatccattcctgtcagaaatgccgccgcgatcatcagaactgcagatactctggatggcagataattaaacacgtcatccatctttgccgccactctcccgaaataaagatttttttcattcttatatcccagcatcgaatccatcgtattgaccgctttatagaggaatccaagcggtgcaccgccaagcatcagaaacatcagcggcgcagtcacaccgtctgatgtattttctgccacagtttccactgctgcctttgcaatcccttcttctgtaagggatttggtatctcttcctacaatcatggaaactgcttttcttgccccctccacatcctgtgttttcagagcatggtataccttcttactttccacagaaagggaacgtgccgccaggatctggtaacaccagaaacattccagaagaaacgaaacagccgggtggatcttctctgccgcccacagcatcagacatggaatccctgtactgatcaaaatcaccaggatccacagaattccccctgccacaatctgttttttcggtgattttcccgccacacttcggagcggtttttccaaaaaagaaatcagatgtccgatcagccttatcgggtgatacagccagtaaggatcgccaaagatcagatccagtccaaatcctgtcatacatgcaagtaatattctcataatttttctatctccgtcagttgttttttcccctgtctccagctttcctcctctgcgattgcagaatatccgctgccatttgagacctgccagtcataaaagtctcctcccgtttgagaaaacgctgataaaaccgccatgatcgtaccgccgtgtacgacaaatgctgcttcccggcactgcaaatccatcagatgctccatcatctgctcaaatccaagtcgtgttcgctcaagaaatgcctcctgtccttctccttccggaaaaggaatcgtcccattggaatccagccacctctgatatccgggatcgtcttttaattcttcataattttttccttcaaaacgcccgaaatccttctcccggaaattttcacagatcagatccggctctttttgaaacaacaacctggcggtctgtttgcagcgaagcatcggacttgtgatgatcttctccggacaacacaggatatttcctgtctgccccggcaagatgggctcatctgttcgtccgatataccgtctttccagatttccctgtgtccgaaaatggcggatcagccagattctcataatgcacctcctgccacgatcactgctgccagtatcagaagttcggcaagctgcagaaaatatcctgccagatcgcctgtcatcccgccaaactgtttcatcgccatgtgatggtaataccagaataccagaagagcggtgcaaagagccgccgcgcccatctgcacagaagtcatcagcatcactgccaaagccgcaaaaaaccagcacaccatcacaactgccacccgtttcctgtgtgcctgctcctgaaaggttcgtccaagtccgtcttttttcgcagatgggaacaccatcacagagaatccgctaagggaacgtgacattacatatcctgccccgatcaccgggagcatttctgtttttgcttcactccacaatgccagacttgccacaaggtatagtccaaatccgatcactgcgaaagctccggtgcgggagtcttttaaaatttccagcttcttttctctgcttccataggaattcagagcatccatcgtgtccaggaatccgtccatgtggattccgccgttaaccagtaccggaagcagtgtcatcactcctgcaaaaaacaacgttccgcatgacgtatacacaagaagcgcatttccgaggatgacctccagaattcctgtcaccactcctaccagagggaaaaagcacatggcatatttcatatttttttcattccattccacccggggcatcggaattttcgagtacatcgcaactccgattgccagagactcaaagaacctcattttaacacctcgtattgttcgatctttgctttttcaaatgtggtcatctcccggtaaaccgaaagccccatctccagaaccggaatcactgccactgcgccggtcccttctcccagactcatattacaagtcaaaagcggggaaagctccaacgcctccaacagcatagctcctgccggttctttggatacatgggaaggcagaaaataagactttgaaaccggcaccatgcgcgcggcacacaaagccgctacagaagagataaatccgtcgatcaccaccggaacgcggtacagagctcctcctaaaaagacaccggtcagacccgcaatatccaggcctcctacttttgaaagaacatccaccggatcttccttgtccggctgatagtttgcaatcgcatccttaataacagaaatctttttctcaagccctgcgctgctaaggcctgccccgcgcccggttacctgttctggtgcaacggataacagcaccgacgcaacagcactgctggtcgtcgtgttaccgattcccatctctcccgtagcgatcatctcatatccctgttctttgagctgttccacttttcggatgccgatttcaattgcctgccatacctcttctcttgtcattgcaggttcttttgaaaaattacgtgttccgtaggcaactttttcttccttgactgtcactgacggaacatccaccgccattccgatgtctactggaaagagatccaccccggccactttgctcatcgcacagacgctggtactggattttgtgaaattatctgccaccacagccgttacttcctgaccggtctgtgtgacaccctcctccacaattccattgtctgcgcacataatgaccagtgcttttttcttcagctcataatccggggtctctttgatccccgccatctgtatcactgcatcctccagctttcccagagaaaacagtggttttgcaatctttatccagtgctctcttgcctgttccatacttgtttcatccaaaggtctgatctcttttttcaactcttccagtgtcattttctttcacttccttctttttgtgactgctcccatctgattgcttcccgcatgaaccgctctgcgaataccggattggacgaataggaaagatgcggaaatcccgcaaacagattctgctgcatatgaacgcattcccagcttctctttccgtccggttttaacgcttttgcatctgttccgttatttgtactgtcccagtagtggaattcatgaccgcgtatcctctctcctcgcttcaaaaacgtaccgtccaccactcctgtcagattgatgtaaccaaaccgtaccagtttttccttcggcgctgtctcgcctctgatcacgccggccatcttccagagttttcctttcggatccgcaagcttctcatgaagatacaaaaaaccgccgcattccgcatggcagggcattccattttgaatgctttcccggattttagcaagcatggttttgttttcacttaattctctggcatataattccggatatccgccgcctaacaaaagaccgctgactccttctggcaggtgtgtatcacgaataggactgaaatacaccagattgcatccatatctttccagcagttttagattgtctttataataaaatccaaacgcctcatctcttgccactgcaatcgatacctttggattttctttctcctcatcctcaggtacgcttatttccagagacggtgcttctttggccaactcatagagaccttccagatctaccgtctctgagaggatctctcctgcctgctccagctgtgctttcagatgtttgatctcctccggtgtgaccagaccaagatgccggctctccagatgaaacgcttcatgttccggaatatacccgagcaccttgatcggatgtcctgcctttttcagctcgttttccagcatttctttcaaacggggatacaacattgccgatacgcggtttaacaaaattccccgaatccggctctcctttttaaattccagaaaccctttcaccagagcagccagagacagagcggagcctctcgctgaaaccaccagcacgaccggtatctgcaaggcagctgccacatcataggaacttgcttttgccgtatccagtcccatgccgtcataatatcccataacaccctctaccactgccagatcggcatttttggcatgctctgcaaaaatcccggtcagctgctctttctcgcagaaaaacagatccagattctgagaatcaatcccgagcacctcccgatgaaacatcggatcaatataatccggtccgcatttacaggaaacaacatttttctgctgtctgcaaaacgctgccatcagcccacaggaaatcaccgtttttccgcttccgctggacggtgcggcaattaaaattcttggaatattcacgcttctccctccgaaataatatagatcgggttttgtcctgtcatcatgtgatgacgtcccagttttctcgcttttgccgctgtaatctgtacaatttccggttcccgcaaaagcccttcatccactgcttccattacttccgccatcgtatccagagaaatcgctgtcagtacgatctgtacatccgggttcttctttttaactgccagcaggatttccctcagatttccgctgcttcccccgataaatacatgggtcggcggttccagtttcctgagtgcttccggtgctgttccctccacgatctgcacattatctgtccgcaatttttgcacgtttttacggatcagctcgatcccttccggattcttttcaatagcatacactcgaatactgccgtcctggcaggctgcttcaacagcaacagaacctgttcccgcaccaacgtcataaagaaccgcatctttttccagatcaagctttgcgatacagattgtccgcacttcttctttcgtcataggaacgtttcctcttgtaaaggcttcatccttcaaatgccggcacaccttctgtgatggatgtggattttccagacagacaatgcaaagcccctctgtatcctcctccgtcagttcgcttaccgtttttgaaaaaatctgctcttgcggataggaaaaattttttccgatatgtaccgtcaagtcttcaagcccataatacaaaagcttctctttcagattttcttttcttccgcccaacagcagaaaagtttttgcatgatgttctgcttcataaatccagttctgccatcttccatggaggctgacaagggctgcatcctcccaggaagtgtgtagcgcagctgcaaaatacacaacagacgaaattcccggaatcctttggatttcataccgttcttcactgccatttagaacttcttccagtttttttgccccgctgtaaaatcctgcatccccggaaagtacaatcccgatcctgcaaaactgcggatgctttcgaaggtactcttctattttttccggcagatattctgcatggcagacacaatctgcatcggatacctcttccagaagccgttttgcgccaatcatacagtcacagccttttaaagactcttttgcccggacagtcatcccctctttcgttcccattccgatcccggccagataaacgattcttttctctttacacatcccgatatcctctcggtgtcaccatgtgaccatccatttcctgtgtctgttcatttccgataaacaccgttgtaaacatatccacctctgtgtcttttaattcctttaatgtaaggatccggctctcctgcccgtctcttccgatctgtctgacaattccgcagattgtatcttctgctttgtattccagcatcatattacatgccttctccagatagtcatgacgttttctgctggaaggattgtaaagacagatcacaaaatctgccatggctgctgccctgactctcttttcaatcttctcccatggtgtgagcaggtcacttaaactgatgactgcaaaatcatgaattaacggagctccaagcacggctgcaccgccgattgccgccgtgatccccggcacaatctcaagctctgccttaggaaactcgacaccgacctcatacatcaaaccagccattccatacacaccggcatccccgctgcagatcatcgccacttttttccctttcatggcctcctcaaatgccatcttgcaccgcttcacttcctgcttcatcggcgtggtcagaaattctttctcgggaaactgctctttcaccagatctacatacaccgtatatccgatgattgtatcgcaggcattcagcacttctctcgcctcttctgtcatctgttttcccgctccgggaccgatcccgactacatacactctattcatctgcctgctcctcctgttttccctgtcgaaattctgtggtaaattccggatggtacagaagtgatctctcatattctccttccagaattcttcccaccacgatcagggctgtttttgtcacctgtgcgtctgccgctattttttccagttctgagaccatgcatcgcagcactttttcctccggccaggttgccttgtacacgatcgctgccggagtgtctgccggatatccccctgccatcagctcttcctgcagttttccaagcattccggtgctcagaaaaatcaccatcgtcgcctgatgcgccgcaaagctgcggatggactcttcatccggaaccggcgttctgcctgccattcttgtaatcaccacagactgggaaatatcaggcagtgtatattctgcatgcagcgctgctgctgctccgcaaaaagaactgacacccggacatacttcgtacggaatctgacgctcttccaaagcatccatctgctctcttatcgctccgtacagacacggatccccggtatgcagccgaacgatccgttttccttctttttcccctgcatacatcacttccagaacttcttccagcgtcatataggcgctgttatatacttcacagccttctttttttacctgcaaaagacccggatttaccagtgaccctgcataaatgataatgtccgcttcttttaaatactgctgtccccgcactgtgatcagatcttccgctcccggtcctgctcctacaaatacgatcatttcgtctcctccccttctgctattttttctcttttacaataaacaatgaataataacttgcctcatccggaatctcctctgccgaatggtagattgtctcattctccatgccgcagttttctaccatcgtcagatttaagttctgctctttgatcacctgcttgacataaggaatctttcgcccggccttcatcagcacctttgttcccgccatctttaatccttcttcaatctcataggacgcagggatgacatgcagttcttcctggttctccacaaggctctgatccagtcttgccgctgccgcacaaaaggaaggaactcccggtatgatccttgtctcatatccctgtttccgaattctcttgtgaatatacatacaggtcgagtacacggtcggatctcccagcgtgataaacaccacatccattcctttttccagaagctctgctgttttttctgcaccctcgtcatgtacctgacgaagccgttctttttctttcatcatcggcattggcagatacaacttggctttctccccgatttgtgcatctgcctgcactgcgatctgataggcaacacatttttccagataacgtttatatgcaggatctgttcctgtcggatcatacgccgcctctgtaaaatttttatccgataccgggattgcaatcaccggacactgcttcatgacacgcagtgcctttactgtcaaaagctcgggatctcccggccctacacctgctccgtaaaatattccgctcattctttttctcctgttcgtttctttttcactgattctgtacgtatgatttccaaaagttcttctgcaccggaagtctctcctaatatcccgttttcattcgaaaacacgattgcttccacacgaagagactcccctcctctgtgcttcagataaaatgcgatccgtttcattacagaatccataacctgtcccaacagctgttctttttcaagcagttctgtcatttctgctgttgtaatactttccataattttttttacggtttcagaatcagcccccgccatcgccgcatgtgaggcaaatacttccatcctgcagtccgcctgtctggagtgcgtattcatcactcctgccgccaccttgatcagtttgcccacatgtccgatcagcagaattcctttcatcccgagccgcaccgcatgatcaatggattctccgatgtaattgctgcacttgaccgcaagatttccatcataaccaagtgcttctttcagaaaatcacttccataatttcccggtaccagataacagtactcgtttccattttctctgagcatcttcatttccaggaaaatcgtatctgtcagagctttctcactcattggctctacaatgcctgtggttccaagcacagaaagacctccttcgataccaagcctcgggttgaatgttttttttgccagttctgctccgtcaggaattgaaatgatcacagaaagaccgcctgtgtacccgccgcgctctttctctttttccactgcttcacggatcatggctcttggaactttattgatcgcggcatcgccgatatcctgctccagtccttttctggtaatacgtccgacaccaacgccgccatccagtgtgatctgctttccctctgttttggaaacctctgcatagaccagaatctgatccgtcacatccggatcgtcccctgcatcctttcggatcgcacagcgtaccttgtctttcgtacgcaaaatgtcctccacatccagatacagtcggatcccttttggtgtcatcagagaaacctgacagatctcttctcccaaaaacagcattctggctgctgcttttgccgcagccgcagcacagcttccggtggtatatcccattctcagttttttctgatctttccacacaaatgcctgttctgtcattgtgcctcctctaaatgctccatgaaaatctgacggattcccggaagttctccaagtccccttaagatcggacgaacttcatatccggcttcttccagctcacatttccaggaatcctcatctcctgccatatcattttttgcatgatctcctgccacaaacataaacggcagcagtgccactttacgatactgtctttgttcgatccgatgcatcacgtcttttaattctggaaatccttctacagtcgccacatgaatgcggtcatatcccaatgcctgaagtgtatattccaacgccggataggcactgtttgcatggtgatctgttccatgtcccattaagatcaggcattcgccttcttccagatccacatcctccatcactgcatgcactgtctttttataatcatccggttcagacaaaagtggttttcccaccaggactttttcaaaagacgacgcatgtttttgaatctcctccagcattttttcattttcaatgccgttgatgatatgtgtcggctgaacgatcacccttgtgatcccgtcctgcttcatacgctccagtgcctgacggacattatcatactttttatgttctgtccgttccagtttgttcaagatcatctgacttgtaaatgcccggtatactgtatacccgggaaatgattctttgatctgctcttccattacctgtattgtttttgccatcgtatccagatgactggttccgaagcttaccacaagaattccttttttctccatttttaatccttcctctccagaaatttctatccgatcaactgctccagctccttccatgtccttggagcttttcctgttgcttctattattttacgtgcttttaaacgatcaaataaccgtaaaagagccggttcttccagattcgtctctttcagcttttctgtttctctgcacactgcttccggcgcgccctgacagagcacttttccatctttcatcaacacgatctcatccgcccaggcatatgcataatccatatcatgagtcgccatgagtactgtgattccctgctctgtaagtttgtctaccatctcatttaccatgcgggtatgcttcggatccagggctgctgcaggttcatccaaaatgatgatctccggacgcatcactaaaatatccgcgatcgagacctgttttttctgccccccgcttaacgcatgtaccggtcgttttcgaaagggcacgatctccagttcttccatcacctgctccacttctgttcttgcctgttcttttgcaacacccagattcaggatcccgaatgagatttcctgctccacgctggcagaaaacaactgtttatccgggtcctgaaacacaatccccaccttggcccgaagtgccagaagttcctttctcttgtagctcaccggttttccatgaaacaaaatatctcccttttgtggtcgtaaaattccgttgcagcagagaaaaaacgtagattttccagaaccgttggctcccataaaagcaaccttactccccttttttacttttaagtccagcccctgcagagaaaacctgtcattctcttcataagaatgccagatatctctcgcctctaaaataatctcttcactcatcctattctctcccaaaccgcaagcaaaatcaggactgcctcaaaaactgctattttccggaaattgctcttgtttttttgatactctcctgaaagtaccctgatctcaccgtcataacatctggattccatcgcattgtacagtgcatccgactgcttcagcgcccgcacaaacacaaccgatgccatctgcccgaaagactggatcgaagttttcagatcccggtttccaagccttgctttctgcgccgtcataattgcagatgccccttccatcaggataaaaataaaccgatatgtcaaaagcatcagctcaatgaacaatcccggaaaatgcagtctctttaacacatccagaatttccgtcatcggcgtgttaaaagacaggacatacagactggaaacacttgcaagcgccgtcagtatcatctgcccgccttttttcagccccatccagctggatgtcacataatactgccccagcgggattgcataggcatccagcggctctttggatacattgaccaggattgccagtgtactcaacagcagaaatatcaggggtaccatcaggtatttcaagtacaggtaaaatggaactcttcccttttttacattaagaattccattgaccgccagtacggtcactgccgctgcaacagaccggctgaccacacagaccaacagggtcagaaccgcatatgcaaacttctcctccgggctcacatgtgcaagtccggaggaataacttaatttatcaatgattatcattctgccacttcttccgctctacgagacgccccatgcaaaaagcgatgatccccacgccgattccggtctgtacacaaaacagcagggactccacctctcccgggatctcttttccaagaaactcttccagaacaggggtaaaccatggttcatattctccatggatctcttctaccatcacacttcccgcatcatctgatccgccaaactctgcatctttcaaagtcagaaacggaactgctgccagcaggaccaccgcgagcagcagaaccagtaccagtgttttatttttcttactcatcctacttttcctcctttaaaaatccaacggctttgagttccggttttgcataagactccagtgcgatcacgatcacaaccgtaagaagtccttccattactgccagcggaagctgtgtcggagcaaacactccaaggaatttcactgcggaagctcccaccccgcccgcttcagacggatatgccatagcaagctgcagactggttacacagtaagtgaacagatccccgaaaaatgctgccagaaacactgccaccttccggtttacattgagtttctggcaaagcttataaatcccataagaaagaaacggacctgcgatcgccatagaaaatgtattggctcccagcgtggtcagtccgccgtgtgccagcagaattgcctgaaataataacacgatcagccccaacacgcctgctgccgtcggcccgaataaaatcgcacccagtccggttcctgtcatatgggaacagcttccggtcacagacgggatcttcaaggaagaaatcacaaacacaaaggctcctgacattgccagaaggatcagtgtttttctgttctgttttaatgttttctgaatggaaaaaaatcctgcgacgataaacggcaggcagatgactccccacgcaatgcaaaatgctgccggaaggtatccctccataatgtgcatagcatttgaagccggtgcgatagcaaataacaccgcgatcgcgatgcttgccttcaataagatgttctgtttttttgtcatgttcttttctctccttttcttttgacaaaatttttctgaaatattccaggctgccaaaagactcaaaaaggagactgtttcgcatacacccggtcatattcccgtaaccttccagattcctttaaaagcgggtgttctgacttaggcatcaaacacagtatttcgccttcccataggatttcctacagtgacctcatgaaataccactactccaatacagcaacgggcattgtccgggattcccacccggttcccctgccgccttttttcggacggcatcttttaaatctgctttgaatctgaatttatgtaaaaacccctgcgtttcctgtattagaaaatggagtccatacatacaaatgtatcatttttaatattcaattcctctgcgggcacaaatgccgcagtcaaatggatgttttacttttcggatctcggatacatagtctgcagcttcgatcaaatcttctgttggatttcttccagtcagaaccacttccagaccttctggtttttcttttaaaaactgaattgcctcttcatgcgggaccagaccatagtgatctgccgccataaattcatccatgacaagcatgtcacacgctccatttttcgcccgatccagtgcatacctccacaattctccatacatctgctttgtctctgccttttcttcctcggactgcgtgttataaaacccataggacttcggtaaatggatcacttctatccccggaatctgatctaacacacacaattctgcagagttctcattcttcaaaaaacgggcaaacagtactttcatcccgcttccggctgcccgcactgcaagtcccgtagctgccgtggtctttccttttccgtctccacagtaaatctggatcattccctgcctcatattctgtcctctttctgtttcagcctttccttaaatctttctaaattttagcacagccctgcccatatttctaggaattttttcgtttcttttagtattttcccaacttcaaacggtcttcctactaccaccagcacagcctttgcctcttctgcagcctgcaccttctccagaaaaccaccggattttccggattcttttgtcacaaaatatctggcatccacagctcttagcatcgcaagatttaattcttttgaaaacggaccctgcatggcgatcagatgccttccttcgaatccaagccgaatgctctcttccactgaaacctgtgtagaaaggacacgggcataacatcgctctttgcagcctgctatcctggtatattctttcaattctttacttccggtagcgatcagaacattcccgtctgtattttgcaggtattccactgcctcaggtacactttccacacgcacaacacgctcccctttatcatcccagttctgccgttcccgcacacatctgatatattccgtacctgccatcctgcatgcctgctctacgtttttcgtcacttctgctgcaaacggatgtgtcgcatcgaccaccagatcaattttctgcgccgttaaaaactgccggatctgtgtctcatccatacgtccggtacgcacacttacattagaagaactctcaacatccatacagtctcttccatactctgtggcaacactgacgatgacatccacctgcctgtttctcagaaattctgccagttcccgtccttctgtagtacctgaaaaaatcaagatacgcttcatctttcttcctcctctttcctaaattttaccataacttcaccacagacaaacgcagccgtgcactgattcagacaggccttttcctgaaccatcactccatccggacacattcttttcgctgctctctcacagacattgtctacccctgtcactcctcttacaaattccgaagaactgctgactgccgaaatttcctgaagtgattctgcggaataagtcaaaaactccactccaagagaatctgccagctccagcaacccggcctcctcccttttcagatcgatgcttccaagtgcacggatctgctccggtaaaaatccatgcttttccagagttttcaaaagctctgcctccagaatttctttttttgtcccttttttgcatcccattcccacatacagatttcttggcaaaagatataatacacctgattttttatttctgggatttttttcacagatcacaatcttcccacagcatccctccagttgttcttcactgccgcatatggtcagttcttcgggtatatcccccaaaagcggaaactctgaaaaaattcccgtattctttttttcaagaatccctgccgagatttttttcgcctcttcccggtctgtaatgatgagtccgttctccatggcaaacacgtctgccgcaaactttttctgcacatctgtagccgttgtgatcaccgccctgcctcctgtgtattctgcaagaaccttcgcgagagttactcctccgcctacatgtcccgacaaaagcgggatggcaaatgtgcccttctcatccagaacaatcaccggaggatctgtaaacttatcttttacaaacggagcgatcgcacggatcgcgattcctgccgccccgataaataccagtgcatgttctccccaggatgccccgatttcctgtttccatccgtcatttaatcgctgcagtcttttatcctctgcaaaacgtgccacagtatatcctgtacatacatatccttcctgttttagtttttccgccagttttaacgccagacagcttccagtcccggtaaaactataaattctcacactttttctcttcattattttcttctcttttcactttcttttcatctactatactattagccggcgtttccgtcaaaacttagtttgattagccggaacaataacaattacaattttctgcctgtttgtttaattttgaaaattttgcatgattttccaaaaattctttgtttagtttcacccttgtcatttttcagcttctctgctattctgtttgcagacgaagatgtctgaaggatttttaaaaatctctcaggcatcttttttttgataaaaggccttttcagaaaaactatttttatctcaaaggaggaaattttatgagttcaggagatactggttttatcatgctttgctctgcccttgtttttcttatgacaccgggccttgctttcttttatggcggattggtccgccggaaaaatgttgtcaacacaatgatggcctgcatcggcattatggggctgtccatcgttatgtgggtactgtttggatattccctttctttcggcggaaaccatgccggaatcatcggtgatttccgatattttgcttttcagggtgtaggagccgatcccggaccctatgctgatacaattccacatcttgtatttgccggtttccagatgatgttcgcagtcattacccctgcgctgatcaccggagctgtcgtcggcagaatgcgttttaaggcactgtttctgtttattgcattctggtctttgattgtttattatccgatggcacatatggtatggggagaagacggtttccttgccgctttaggatctgttgattttgccggcggaaatgttgtccatatcagttccggagtatccgctcttgtccttgccatctgtcttagtcgaagacgcggatatgaacacacttcctaccgcatccacaacatcccatttgtcactctgggtgcatcactgctctggttcggatggtttggcttcaatgccggaagtgctcttgcggcagatggacttgcagctcacgcttttatgacctctgcgattgcttctgcttccgcaatgctcatctggatgctcattgattatctgaaaagtaaaaaaaccacacttgtcggtgcttctacagggctggtcgtagggcttgtagctatcacccccggtgccggatttgttccgatctggtcttctttcctgatcggtgcacttgtcagtccgatctgctattttaccgtggtgctcttaaaacagaaattaaaaatcgatgatgcgctcgatgcgttcggatgtcatggaatcggcggtatctggggcggtattgcgaccggacttttcggtaaaacttctgtcaattctgttgccagatggaatggattagtcttcggagattttcatttattcactgcacagctgatcagcattctggtcaccattgcagttgctgtgtgcggaaccttgatctgcatcggtatcgtaagaattttcacaccgcttcgtgtagatgtttctgatgagatatccggtctggatttctcacagcatggagaaaatgcatatccgtcctttaacggatttgattcataaaagagggggagtcatcatgttgatcaaaattgaagcaatcgtaagagaagaaaaatttgaacaggttaaatctgctcttcaggacatccaggtgaacggggttaccatctcccaggttatggggtatggaacgcagcgtggctatacagaaattgtccgcggaagtgaagtagatatcctgttacatcccaaaattaaatttgaagtggtcgtctcttccgaagaatgggaacaaaaaacaatctcagcaatacaaaaagccgcttttaccggcgaagtcggtgacggaaaaattttcagctatgaaatccgcagcgctgtcaaaatccgcacaaaagagaccggttataatgcagttcagtcacaagataatctttaatctgccggggaatcacagttccatttgtgatttcccggtctttttattccaacatgatccaatttgcacgaaaaggacgcattaaattccagtatccgactccatatagttcatattcttttgccagttcgatctttgccgcaatacttctcacatcttcaaaccagacttcctgctctcttccctgatttctgtaaataaaatacgggctttgagcctcctggtcatactgaattggagcaccgtattccaccgcaagccgtacagcccctacattaccgatcgtctctgcttttgtcactcctttttcataaggaagggtccagttatacccatagttcggtatccccatcagaagcttctcagccgggatctgtgtcagcgcatactctaccacctggcggactttcgtaaggggtgcgactgccatgggcggaccataagaatatccccactcataagtcatcaaaaacagccggtctgcctgttctcccagaagtgcataatcaatcccctcatagagcagccctttctgatctgaagacgtcttgggcgccagagccactgacacgcgatatcccttttcattcatggcagcccgcaattctccgacaaactcggcatatccttccctgttctgcgcacggacatattcaaaatctacatccacgcccacatatcctttttcctccaccaccttcagcagattggtaatcacattttcacgtactgattcttcctccaccagagtctggatcagctgattgttaaagaccccctgtgtaaacggggtcagaaccagcatcggttctatcccattctcccaggccagctgtatcatccatgtttcatcctgtatgggcggaaccaactctccttcaaacgtaaaaccataagaaaacaccagcagttcattgagtgccggaaatgccatctccagcacataaggttcaataaaaggatatgcataccctgtcacatacaaatcctctcgaatttccgcgctctcctgcggttttaataagagcagcgcctgccccactgtcagttttccctcttctcccagctgattatcataaataatcttccagacgggaaccccactttgacgggagatcgaagatacagtatctcccggtactgtcacataaatcataaaaacacctcctgactatcctatgtccgatagccgggaggtattcgataaatcagtgtttgaaaaactgttgactttttttgtaaagtggcatatcataatcttagctaaggaaatggagaatattccatagtcaaagtgaacccccaaggaggccagtccttgggggttctttttgggctaactgtctttatcattccggtctaaccacttgcgtatgtagtagccagccacactcgccataaccgaaacaaggaatcggagaatataatccatagtctcacctcccttctgctggaaggtttcgacagcatattcatcatatcacagcatttgtttcttttccatgcattttttcaattccacagagtcaaaaaaacgccatctatgtccccatagaatggcgtttttcttcctctataaaataatcatcgcatctccgaagctgaaaaaacgataccgttctttcactgcctcttcataggctgccatgacatgctcttttcccgccagtgcagataccagcatgatcagtgtagattccggcagatggaaatttgtgatcagcccatctaatatcttaaactgatatcccggatagataaaaatttctgtccggccgctgcaaggctttaagcgtccgttctcgtccgccgcagattcgatggtacggcagctcgtcgttcccacacagatcacacggcctccatgttctttggctttgttgatcttctctgccgcttctgcatccaccatgtaaaactccgaatgcatatggtgctcggtcacatcctccactttcaccgggcggaatgtgcccagtccgacatgaagtgtcactcttgcaatatccacgcctttttcctgaatttctttcaaaagcttcggagtaaaatgaagccccgcagtcggtgctgcagctgaaccttcgtgagctgcatacaccgtattataacggcttctgtcttccagctggtgggtaatatatggaggaagcggcatctgaccaagctggtctaaaatctcctcaaagattcccttatactcaaagtgaatcagacggtttccctcttctaccacatccacaacctcgccgaccagaagtccgtctccgaaactgatcctggttcccggttttgcttttttccccggttttaccagtgtttcccacacatcgttttctccgcgcttcaacaggaggacctcgatcttggcaccggtgccttctttttctccgatcaggcgtgccggaattacttttgtatcgttgatgaccagacagtctcccggattcagataatcgatcacatcccggaagatatgatgctctgttttccctgtctctttatccagaaacaataatctggaaccggagcgatcctccagaggatcctgtgcgatcagttcctccggcaggtcataataaaaatcacttgttttcaatgatatccctctttctaagcagactcggtcctattttctcagctcgattcccatctcttccagtgcttttaagatccggttcatcgcggaagttacatccgcctcttccagagtcttatcctttgcacggaatacgatagaatatgcaacggatttgaatccggctttgatctgacttccttcatacaggtcaaacagtgcatagctttccagatatgctccgccttttttctcgatcacatcttcaatctgtcctaccagaatctcttttggcactaccatactgatatctcttgtcacagcagggtactttgcgattcctgtatattttctgtcaaaagttgcatacggaatgatctccggcatatccagcactgccacataagcgcgctcgccgattccatatgtatcggctacttccggatgtacctctcctaaatatccaacaacctttccatcatacataatatttgcctgacggcccgggtgcagatatggttttcctgcatttggatcatacgtttctttttcgtgcattccgatcttttcaaagaattcttctactacacctttcatgctgaagaaatcgccgtctccatacattcccaatgtaaactgcattctctcttccggaagttctgtaaccggaagctgtttcggaagataaatatttccaagctcgtacagtctgacatttttatttctgcggttgtagtttgtcgcaagagaagtaagcattccatttaaggatgtcgttctcatcacactgtagtcttctcccaacggattcatgatctctacggtttctctcaatttggagtctgccgggattctcagtttgtcaaacaccttcgggctctcgaaagaataggtcattccctggctgaatccgcagaactctgcgatttcttttgccacatcttcgattctcagtttaaacggcagctttcctgttgtagcctctccctttggaagtgtggtcggaatattgtcatatccgaaaaatcttgccacttcttctgccagatctgcgattctgaacaggtcatgacggaatgtcggcgcgatcacttcttttgctgcttcatcatattccagaccgatctttgcgaaataaccaagcatctcttcttctgaaatggaagttcccagcatggagtttatcttatctgcatcaaatggaactcttaccggctcttttacttttccgtaaacatccacggttccgccaaccacttctccggcgcctaattcttctactaactggcaggctctgtctatggctgcttttgcattgttcggatccagacccttttcaaattttccggaagcatctgtacgaagccctactctctttgaagattttcggatgttgacaccgtcaaagcatgctgcctcaaagagcatggtcttgacatcatctgtgatcatggagttttctccgcccatgataccggcaattccaactgctttttctccgtcacagatcatcaggacgtccttgtccatgatacgctcctgtccgtcaagtgtggtaaatttctctccatcctgtgcagtttttacaacaatctcatgacctgcgatcgtatccagatcataggcatgcatcggctgtccgtactcttccatcacatagtttgtaatatccaccagattgttgatcggacgaattcctacagatgccagccttctctgcatccattttggagacggaccgattttaatattttttaccactcttgcacagtatctcggacacagatcggcatcttctactgttacttttatataatcgttgacatcttctccatttcctgtctctttcacgattggaggaacaaactctttgttgaatgtagcggctgcttctcttgcgattccaagtacgctgtagcagtctacacggttggatgtcacttcatactcaaataccacatcgtttctgtcaagcgcttcaatcgcacttgctccgatttcggcatcctccgggaagatatagattccgtcttccggagcctccggatacatatctgtcgtagaacccagctcctcgatagaacacatcatcccaaaacttgccactccgcggagcttgccttttttgatcttgattccgcccggaactttctgtcccggctcatgtccccctgccacgcgtccaccgtccagtacgaccggcacttttgcaccttcaaatacatttttcgcacctgttacgatctgtactgtctctgttcctacattcacctgacatacgaccagtttgtctgcatccgggtgcttttcaatcttatcgatctgaccaatgacaatcttttccagatctgcatccagctgttcatagccctctacttttgttcctgacaatgtcattgcatctgtatattcctgcgctgtcacgtccagatccgggacatacgctttcaaccatgataaagaagtattcataatcctattcctttctctccacctaaatcctagaactgtttcaaaaatctgatgtcattttcatacaaaagtctcatgtcatcaatttcatatttcagcagtgcgattcgctccagaccgacaccgaacgcaaatcctgaatattcctccggatcgattccgcacatctccagcacatgtggatgtaccatcccgcatccgaggatctcaatccagccggaacctttacagaatcgacatcctttgcctccgcatttgaagcaagtcacatccacctctgcacttggctctgtaaacgggaaatgatgcggtctgaattttgtctttgtctcttctccaaacagctcttttgcaaacacttccagtgttcctttcagatctgcaaaggaaacatttttatcgatcacaagaccttcaatctgatggaaggatggagaatgtgttgcatccacttcatcagaacggaatactcttcccggtgcgatcatacggatcggcagcttgccctgctccatcactctcgcctgaaccggagaagtctgtgtacgcagcacaatgtccttattcacataaaaggtatcctgttcatcttttgcaggatgcccatccggaatgttgagtttctcgaagttgtacaggtcgtattctacttccggtccttctactacttcgtatcccattcccacgaaaatgcgctctacctcttccagcgcgatcgtatttggatgtctgtgtcccaccgtacttttcttagatggcagcgtcacgtcaatgacttccgctttcattttttcctcacggatggctgcctccattttcacttttgtctcttctaaaagctcttcgattgcagctcttgtctcattgaccagctgtccgactttcggacgctcctctggggccacgtctttcattccctttaatacggctgttaattctcctttttttccaagaaattttacacgcacctcgttcagcttttccggcatatcagaagctttaatctgctccaaagcctgtgctttgatttgttccagtctgtctttcatcttctttctcctttctttgaaagcatatttcttagtatgaaaaaaactccatcccaaaagggacgaagtctgtattcgcggtaccaccctaattcccacagtcttcctgtgagcacttggtcttgtgtaacgtacaatagacggcactttctactctgaaatcatttcaaaaatgcagcttacgtgggaatttcgattgccgtctgaaccaaagaaggcttacagccagtgaccttctctctctgatggaaaacagttctctactgtgcacgctcatcgcttttcatatcctgattcattttttaaatttaagacaaatttactttattatcttatcacagtttttgtgattgtcaagatatttctctaacagtgcattgacttctccgccaagcaggatcacatacatacacagatacagccacagcataatcagcacaatcgtagtcatacttccatacatatctgaaaatccttcaaagatgtccagataaatcgaaaagataaaagagatcagcagccatccgcacgctgtaaaaacggctcccggaagctgtttacgcaaagttgtcttctgtgttgctctccggtttggaagatatttataaaccagatcccagaaaacggtcagaactgcaagtgtcataacggtccgtatcttaataatatactgcatcagagtactccagaacggtgcatgcttgtagatcatggcgctgatactgtttccaaatacagacagaaccagtgacagtacgattgcaagaatgaagatcacggtatataaagaagccctaagcctcaggtatacataattacgagtctcggtattaccataaatgcagttcagtcctgcagtcacggacagtacccctcttcccgcagaccacagcgctacaaggatcgtgatcggaatgatcttagccgactgggaaaaatagacctgtgtcacgatcgaacggataaacccctgcacggatgtcggaaacacctgctccactgcatcgatgacatttgcataagtagccggtgtaaactgtaccgccgtcagcaaaagcaggatgatcggaatcatagagagtacaaaaaaataagcagcctgggccgcatacgctcctgtatgatgggagccgacgatctcagtgactttatttactttttttatcgtctccttgactcttcttcccataatattctctcctgctgctctcaaactttcaaaatcatatcataaagcccctgtttcgtaaagggatcttttttgaaggcttgtatatcctgtattgatgaaataagggaatgaaatcagcctgtgctaaatttcattcccttttatcttctgtagaatccccaaaatgccgttccctgtattttgactcctagcacgcaagctaggtgggcaaccgcatctgcttttctgtcttccactgcataacggaggcttgacatattacagaaatataagaatcccgtttaaagtattgtaggttcaaaataacaaggttatcgaacatctcaggttttccgttgaatttattatagcctatttacatagattttacaacccatactccatttcttttttcatggtatttttttcaaatttatggtatagtaacattatttacatttgaatgcaaggagaggatactattatgaaaacaactgaattaaaactggtctatttcagtccgacagggacgacaagaagggtcatcatggaggcagcacgtcagattgaccttaaatccgtctcatttgacctgtccgtacataaagaaaaaaagccggttctgcaatttgacgaaacagattttgtcctgtttggaatcccggtttattccggccgggttcccgaaacatttctttcttatttcgagacactcaaaggaaacaacactccggctgcgctgatcgcaacttatggctgccgggcatacgaagatgcgctgttagaattaaaaaccgaggtggaaaatcggggattccacgtaatcggtgccggtgcatttcctactgagcattcgatcgttcgttcaattggtctgagccgtccgaataaagcggatctgaagacaatcagtgagttcgggatcgcattaaaccgccgtatcaaaaatgaagatctctctgcgctctccattcaggtacctggtaacactccatatcgcaaatacgcaaaaactccactgattccaaaggcagatgtcagcctgtgcacggaatgtaaagcttgcgtcaaatcatgtcctgccggagcaatctctgcacaggatccgaaaaagacggacaagaaaaaatgtatttcctgcctgcgctgcgtacgaagctgtaagcaaaaagcccgcagtgtcagcagtatgaaactctccatggcagccaaaaaactgaacaaagtctgtcagagtgataaagccgctgatatctttttataaatcctgtcattagaacgttattactccgatagataaatcatttctgcaatttgtatgacgtaagaagagagtcagatcctcctgactctctttcgttgatattccccttgtatctttctaaaaatatttctttttcagttgcatcgtatacactgcaaataccaccagtgctgccataaaaagaatgccgcccactgtgtccaccatctccatcggatttacataccagtggatacaatctacaattccataaagaatcgaaacaattccaaatcccagaactgccggcaacgcctttttcagatatgcttccttatctttgcacatcttttctgaataactcttccccaggagaatcgtttcattaatgtgtccgtcttttttcatgttaaaatatgcatacaggcaatatatcccgcatcctactgcaagaattccgataaaaccaaacacactgttcatactgtccgcactcattgactatacctcgatttctaatatttctttcactgtctctttcattttgtctgcatcacactctcttgtatgaaggattttcgcatcacgaatctccttgaccgcattcggaacggcaacctgagaaagcttctccagctcgtccacaagctcaaactcgtctcttcccgcatattctgcatcaattgcacgcatcacactgcctacgaatttatatggactggctgtggaagcgatcagacattttgtctcatccccactttcttctctgtactgtgcacatacacaagaagcaactgccgtatgtgtatccatcacatatccggtacgtttatatgtatcgtggattgcctgtgctgtctgttcctccgttgcataacctcccacaaaatcatccagttttcctttcatttcttttgtaatctcatatgcaccactactttttaatgcatccatcagttctgcatttttctgaccatcctgtcctgcaattgtatagatcagccgctccagattgcttgagatcaaaatgtccatggacggggaggatgtcagcacaaattctctgtttttgtcatatgttcctgtacggaagaaatcaaacaggactttgttttcattggatgcacagatcagcttattgatcggaacccccatctgttttgcatagtatgctgccagaatattaccaaagtttccggtcggaaccgtcacattgatcttctctccactttgaatctcgtcgttctgaagcagttttgcatatgcatagacataatacacaacctgaggtaccagacgaccgatgttgatcgaatttgcggaagagaactgatatcctgccgcatccagttcctttgcaagcgcctggtcttcaaaaagcgctttgacaccgctctgtgcattatcaaagtttccatgaattgccacaactgaagtattggcacctttctgtgtcaccatctgcatctcctgcacccggctgacaccgttcttcggataaaacacaataatcttcgttcccggcacatctgcgaatcctgccatcgcagcttttccggtatctccggaggttgctgtcaaaatgacaatatcctttgtcacatgattcttctttgcagatgttgtcatcaaatgcggaaggatcgataatgccatatccttaaacgcgatcgtcgctccgtgaaacagctccagatgatagacatctcccactttcacaaggggggcgatcacttctgtatcaaacttggaatcatatgcgctgtctatgcagtgctttaactcctcctctgtaaagtctgtcagaaactgtttcatcactgcgtatgcagtctcctgatacgtcatgttcttgagttcttccattgtcacatccagtgtcggaatctgctccggcacgaagagtccgccatcttctgcaagcccttttaagattgcctcagacgctgttacttttttttcagaatttcttgtgcttttgtataacaaattcatatcttcgccctctttttctttcttcacactgttattgccatgaattatatcataagtgctctgttttatcaattttgtttcttaaatacaatgaagagaattgcactgacacccatcagaatggggtagaacaaattcggaataatatcaaacggagtcagtcctgtgagagttgccgcagacagaagctgagctccatacgggatcattccctgccccacggatgtaaaaatatccagaagggatgcggatcgttttggatcaatgtcatattcttcactgatctcttttgcaatgggacctgccatcacaatggcaatggtattattggctgtacaaagatctacaaacaatgccagcactgcgattccaaattcgccgcctcttcttcctctgatcctgcttttgatcagatttaagataaactggattccaccatattctctgacaagtgacacgatacaggcaacaatgatcgaaattaccgtgatatcatacattcctgtcacaccttttcccaccacattgaaaatctcagacaatccgatgcttcctgttgcaacgcctacgatcagagataacgcggttccactgatcaaaacaacaaacacgttaatccccgccagtgctcccaccaatacaacgagatatggaagtactttccagatgctgtatggcatctcctcctggatctgataacttccgtttcttgtcatcagccagaatatcacaatcgttaaaatcgccgccgggagtacgatcagaaaatttgccttgaatttatctttcatctcgcagccctgtgtttttaccgcggcaatcgttgtatctgagatcacggacagattatcaccaaacattgctccgcagacgaccgctccaatacagacggctgctgaaaattctgtcttttcactgattcccgctgcgatcggagccagcgctgcgatcgttcccatggatgttcccatggatacagaaataaaacagccgatcacaaacaatcctacaactgcaatggatggcggaagcaccgaaagccccagatttaccgtactctctacaccgcctgccgcagttactgcaccggaaaatccgcctgcacataaaaagatcagactcatcgtaatgatattctcatctccgatcccgcagaaatcaccttcattttgtctgcaaatgttaacgtcccattctgcaaaaacgccgtcagaagagcgatcaagaatgccacaattgccggcatcgcataaaaatcgccaaatacaatccccatccccaaaaacaggaccagaaataccccgatcggaagaagcgccaccgcccttcctttttcttctgctctcaactttttctcttccactgatgttcctctctttctcatttcacttctttcttcttttataaaatccatgagggtgttccaaaagattctccgattttttgaaaacaccctcattttatatcatgctctttctttcaatacccggtcttaatttccgttctatttctttctgctgtttgtatagcttacaagacctccggctgcgatcagcttctgcataaattcaggaaacgcctgcccctgatactgagttcctttggtacggtcatagatcattccactgtcaaaatctacttcaacttcgtctccggcttcaatctcctgtgccgcctgcggacattcaatgatcggaagaccaatattgatcgcgttccgataaaagattcttgcaaaggtctctgcaatcacgcaacttactcctgctgttttcaggcagagcggtgcatgctctctggaagaaccgcagccaaagtttttctttgccacgatcagatctccttcctgcactttttctgcaaattccggatcaatatctgccatggcatgtgaagccagctctttcgcatcaaatgaattcagatatcttgccgggatgatcacatccgtatctacattgtctccatatttaaaaacgtgtccctgtgctctcatgcctcttcacctgccctctccggatttgcaatatatcctgcaatcgcactcgccgctgccacttccggagatgcaagataaatgagagaatctacatgtcccattcttcctacaaaattccgatttgttgtcgatacgcagcgctctcctgccgccataactcccatatgaccgcccatacacggtccacagctcggtgtgttgactgcacagcctgcatctacaaaaatatcaagcagcccctctttgatacactgtttgtaaatcttctgagttgccgggataaccattacacgcacatccggatgcaccgtacgcccttttaagacagccgctgctttccgcatgtcttccattcttccgttggtgcaggaaccaatcactacctgatcgatcttgatcggttccatcgcctcgatctcatcgatggtctttgcattgcccggaagatgcgggaatgcaaccgttggacgcacctcggaaagatcaattgtcacaacctgttcgtattctgcatcttcatctgcctcaaaaatctgatattcttttttcgaatgctcttctaaatatgcctttgtcttctcatccaccgggaagattccgttcttcgcacctgcttcgatcgccatgttcgccatggtaaaacggtcatccatggataaatgtgcgattccgtctccagtaaactccatggatttgtaaagtgccccatctacaccgatcttgccgatgatgtggatgatgatatcttttccgctgacatattttccaggttttccagtcagtacaaactgaatcgccgccggaactttaaaccagatctcaccggttgccataccggttgcgatatcggtcgttcccataccggttgaaaacgcacccagcgccccataggtacaggtgtgggagtctgcaccaatgatgcattctcctgctgtcaccacgcctgcctccggaaggatagcatgctctactccggacttgccctgttcaaaataccatttcaatccctgttcttttgcaaattcacggatcgcttttgaattctctgcggatttgatgtctttgttcggggtgaaatgatccggtacaaatacaaccttctctttatcaaacacctgatctgccatctgcttcagaatcggcagcgccatcggtcctgtgatgtcatttgccatcacaatatccagctttgcctcgatcagctgtcctgcagttacagattccagccctgcatgtgctgccagtatcttctgtgtcattgtcattcccataggagaatccccctttctcaatctttattttgcctgaataaacccttttgctgtcagagcttctgcgcagagaactgctccgcctgctgctcctctgactgtgttgtgggaaaggcctacaaatttgaagtcaaacatcgaatcttctctcagtcgtccaatcgacactcccattccgttctcataatctacatccagtttcacctgtggacggttgtcctcttccagatactgaataaactgctttggtgcacttggaaggttttcttcctgcgggaaccctttgaatgtcacaagcttttcaatcagctgctcttttgtcggtttcttctcaaaattgataaatacagctgctgtatgaccgtttaataccggtacacgcagacactggcaagtgattttcggaagctgagcctttacgatctcgccgttttctacttttccgagaacacgcagcggctcctgctcactcttttcttcctctccgccaatatatggaatgatattttccaccatctccggccagtctttaaatgtctttcccgctccggaaatggcctggtaagtcgttgccactacttcttttggtccgaactctttccatgcagccagacacggcgcgtagctctggatcgaacagtttggttttactgcgataaatccgcgtgttgttccaaggcgttttttctgatccttaatcacatcaaaatgttctgaattgatctccggcactaccatcggcacgtccggtgtccaacgatgcgcactgttgtttgacacgaccggtgtctctgtctttgcgtattcttcttcgatcgctttgatctcttcttttgtcatatccactgcgctgaatacaaaatctaccgtagacgcaacatgttccacgtcgtttacattcataacaaccagttttttcactgcttccggcattggagttgtcattttccatctgtctccgactgcctcttcataagtctttcctgcagaacgcggacttgctgccactgtcacaacctcaaaccacgggtgattctcaagcaaagagataaatctctgtccgaccattcctgttgctcctaaaattccaacttttaatttcttttccatcttctttctgtcctttcctctcatttttatttgaaaacagcaaacctgctattcttctttcaaatatgcttcttccagtgcgattgcctgctccatggcacttttccccggtgctccgatggtatttcgcatttccacacaagtcttcatgctgatggcctcatagatatcttcttcaaataccggagagattgccttatactcctccagactcatatcatcaagggcgatatttttatcaatacaatataaaaccagctgtcctacaatcccgtgagcatcccgaaacggcacgccgtgattgaccagataatccgccgcatctgtcgcatttgtaaaaccattctttgcactgtcttccatccgctgctttctgaacctcatggtgcgaagcatccccgtaaataatgccagacagccttttgtcgtatcaatggcatcaaacaccagctctttgtcttcctgcatatctttattatacgcaagcgggattcccttcattgtcgtcagaagggacatcaatgccccgtaaactcttcctgtctttccgcgcacaagctctgcgatatccggattcttcttctgcggcataatgctgcttccggtactgtacgcatcatcaatctccacaaactgatactcattggaattccagatgatcacttcctcacagaaacggcttaagtgcatcatcacggtagacattgctgacagcatctcgatcagataatctctgtcagatacggaatccatactgtttaaggtcggtccgtcaaatccaagcagctctgccgtatattcccgatccagcggataagttgtccccgcaagagcccctgctccaagcgggcagtagttcatgcgttttctgatatctttcattctgagacggtctcttttgaacatttcaaaatatgcgccaagatgatgcgcaagtgtcaccggctgtgctttctgaagatgtgtaaatcccggcatatacgtctcgatatgctctttcatcagttttaaaagcacttccagcaattcttttaaaagtgtatccagtgcttcgatctcgtctcttgtgtacagccgcatatccagcgccacctgatcatttctgcttcttccggtgtgcagtttcttccctgcatctccaatccggtcgatcagattcgcctctacaaagctgtggatatcttcatattcatccgtgatctcaagtgtcccgttctccacatctgcctgaatccctttcagaccttcaatgatgctctctttctcctcttttgtcaaaatcccctgcttttgaagcattgtcacatgtgcgatgcttccccagatatcctgcgcataaaatttttgatcaaaagagatcgatgcattaaaattatataccagcttgtctgtttcttttgtgaaacgaccgccccataactgtgccattcccctgtctccttttctccgatagtatcttttcagattgcaattagtttaacacattaacgtgttatatgtccatagaaaactgtgacagtttccgctctattgtgtactgcttctttgtgaaaactcacaaccacagtaatcctgccgatacaatccatattctttggataactcaatggatcgtttgtatccgtttttctttttaaagtcagactgcaggtatttcactccaaactctttctgtgccgccagtccgatctcatttaacttggctgcatttttcataggactgatagaaagtgtggtcgtaaaataatcataaccggctttttttgccatctgtgccgtctcccgaagcctgagcgcataacatttaaagcatctggcgcccccctctttgacatcttccaacccctctgccatccggtagaagcgatccttctcataatttcccgccagaaaactgaccggatgcttcagattcatacgggatatcagctcctgctgctccagaattcgttttgtatattcactttccggataaatgttcggattataataaaataccgtgatttcaaaatactctgacaagtactccaatacataactgctgcacggcgcacagcagctgtgcagcaaaagttttggcacacgtccctctttctggagacttacgatcgttttatccagttctttctgataatttatcacattcatcgtttgtttcctccggattttcattctttccttttttacaatctattatagtatacgtctttccgggatatctgtaaagaaatgtcggattttccaaaagaaacgcacagattttcttgttttccataaactgattatatacttgtcgaatggagtgtctgtatggaaccaattttaacactggatcacttaagctatgcctatcatactctggaaggcgaaacaaaagcactgtcagatatttccctttccgtgaaaccgggagaatttgtggcaattgtcggtccatccggatgcggcaagtccacactgctctcactgattgccggtcttttgaaaccggaagagggggagattctgctcaatggaaaatcattaaaagaaagcgcgaccaatatcggttatatgctgcagcacgaccacctctttgaatggagaacaatttatcacaacatcctccttggactggaaatccagcatacactgactgctgcagccaaaacccatgcacgggagctgttaaaaacctatggactggaaaaatttgccgactcacgcccttctgaactctccggaggaatgcgccagagagctgctctgatccgcaccctgatcctggaaccggatctgctgcttctggatgaacctttttccgcactggattaccagacacggctttccgtaggagatgatatcggacagatcatacgggattccggccgcactgctgtgttagtgacacatgacctttccgaagcgatcagccttgcagataccatcttcatcctcagcaaacgtccggcctccattgcacgtatcgttcccgtcaccttctccctggcctctgacacccctcttaaacgccgcaacgctccggagtttaagacatacttcaatattttatggaaggagctgaatcaaaatgtctgaactttcaaacaggcagaaacgttatctactcctccaaaaacgccatcacctgatcgtcaatttatcaagactcctgatcctgatcctttttctgggactctgggagatcacttcccgcctgggaatgatcgactctttcgttttcagcagtcctgccaagattgtccgctgcttttggagcatggtccttgaccgaagtatttttctccatcttggaatcacactttacgaaacgattttaagcttcctgttcgttaccggaatcagtattctgatcgcagttattttgtggtacagcaaaaaattatccgaaatactggatccttatctggtcgtgttgaacagtcttccgaaatccgccctggcaccgcttcttatcgtctggctcggagcaaaccagacaaccattattattgccggaatgtccgttgcgatctttggaagcattttaaatctgtacaccagtttcacaacaatcgatgaagaaaagatcaagctcatttacacactccacggaacgagacaccacgcactgaccaaagtggtcctgccaagctccattcccgcgatcatcagcaatatgaaggtcaatatcggcctgtgtcttgtgggtgtgatcatcggagaatttttagcggccagaaacggactcggatacctgatcatttactccagtcaggtttttaaaatggattggctgctcatgtcgatcgtgcttttgtgtattatggcgatgggattatatgccttgatcaatctggtagaaaaactctgtaaaaaacggttttaaaaaatcagggaaagcggatcctgtttttacaagttccactttccctgatactttttatgacaaatacttcttttccatttttcattctcctatgtgctttaaaacatggtgatatatccctgtacaaagataaacagcacgatcagcggcaaaatatatgacacatacacccttgcccatttcgggaatcggattccctgtccgctgtttgcctcctctgtaaacttcttccatccccatccataccggctggtgcagaacagaagataaatcagacttccaagcggaagcagattgttgcttaccaggaaatcttcaaaatccaaaatattttttcctgcgcccaaaggagaaatcccactccatacattaaatccgagaatacatggaacagataaaaccaggattgcgatcagattgcagattacagattttctcctgctacatccggtcagctccatggcaaatgtaatgatattttcaaatacggcaatgatcgtagatgccgctgcaaagaacatacacaggaagaacagagttccccagattcttccgccgctcattgcattaaaaatattcggcagtgtgataaagatcagacttggtccctgtcccgggttcactccgaacgcaaagcatgccggaaaaatgatcatccccgcgatcagcgccacgcaggcatccagaatcgtaacacagattgcctcccctgtcagcgcccgtttcttatcaatatagcttccaaagatcgcaatcgctccaatcccaagactcagcgtaaagaaggactgtcccatggcagcatagacgacttcaaatacacctgcttctttcaccttgccgaagtccggcagtaaatagaaccgaattccctctcctgcattcggaagcgtggcagaacgtactgctaaaataatcatcagagcaagcagcaggatcatcatcacctttgtgatcttctccactcctttctgaagccccatgctgcagattgcaaaacacaggattacaacgattgccatacacacaaacatcaatcccggtctcgctgtcagatttgcaaactccgcttcaatcccttttgcgtcaagtccctcaaactgccctgccgccattttcacgaaatacaaaatcatccatccgccaatcgtggtataaaacatcatcagcagataatttcctgccatcccgaaatatttataccagtgccacctggtcccctctggttccagcttatcaaaggaaagcgcaatacttgcctgactcgcacgccctaccgagaactccatgaccatgatcggaagtcccagtgttaacaggaaaaacaggtagatcagcacaaatgccgcacccccgtattgtccggtaatatatggaaatctccatacatttccaagcccgatggcacatcctgctgaaatcaggataaatccaagccttgagccaaatttttctctcttcatctctctcatcctctctcacttattcaacgtttatcttacgtgatatcacatttacttgtcaagaaaatccgatgctgtctgacagaacgcatccttcgcatttgcgatcatattaaatgtcatctgtgccatttcttccggtgatttttcttccccttcattgagccacactttcacaagcccaagacatccgctcagacaaaacgcgtaaaaatatttgagatcctctttcttacccggaaacatcttctccagcgtccccctgctgttctctttgatgatccgctcaatgcggtggataaatcccatatctccgttgggaccgatcagcgctttactgatctcccgctcttcatctaatacacgaaacatatcttctataaaataaaacgcattttcattgccggatacgatcggatgctcttcgatcgctcttttgatctgcgcttccatattctcttcgatttctctcaaaaggtcctgaatgtctttaaaatgaaggtaaaatgtggaacgattgatatccacttcttctaccagctctttgactgtgatctgattcacgcttttttccttcatcagcgctgcaagtcctttttttaactgccttctcgttttaatgactcttctgtctacttttttctccatttgttaaccctcatttccataatatactcatctttgttgtaatttcttataataaatccatcctgcaatatctgccagaatccatccgatcggaactgcactccagattcctgacaccccgatctgaggaaccgctgacaatacatatgccagtactacccgtgtccccaaagaaatcaccgtcagcacaaccgacattcccggttttctgactgcccggtaatatccataaaacaaaaacaggaatccgattccaaaataaaacacaccttcaatccgcaagtattgaattccaactgccagaatttctgtttcgtatggctggacaaaaatcaaaagcagctgctttgcaaacacaaaaactgacgctgagatcaccaaacaaaatcccagtacgagcagcaccgactttcttgccccctcccggatccgctcctgttttccggccccgtaattctgtgccacaaaagtggaaaacgcatttccgaaatcctgcaccggcatatatgcaaatgaatcaatcttcacagccgctgcaaatgccgccattacaaccggtccgaagctgtttaccagcccctgcaccatcaaaatccccagattcataacagactgttgaacacaggtcaaaaacgaaaactgaaaaatctcgccaaacgtctcttttgtaattctgaaatctctctttctcagacgaaactgcggacatcttccccaggtgtagactgcgatcccaattccggaaatccactgagagattacagttgcaactgcagctcccgcaattcctgcatccagtccgatcacaaaccacagatccagaacaatattcagaacggcacagactgccagaaagatcaacggaatcaaagattctcctgccgctctcaaaagagaggcaaaataattatataaaaatgttgcaaaaattccggtgaatactacttccaggtatgttctcatcccgtcatatacctgctgcggcacctgtaaaaactccaggatccattccgtgttccggcaaaccagtacattcagcaatagtgccactgcagcgatcatcagaaatgaagttccgatactctcttttaatttttcttcattcttttccccataccggatggaaaataatgcaccgcttcccatgcacagtcccagcagaatcgaagtcaaaaacgtcatcagtgtatatgatgatcccactgccgccagagcatctgctccgagaaaccttcctacgatcacagtgtctgcaatattatacgtctgttgcagaagatttccggcaatcaaagggagagaaaataacatcatttttttcgtcacaggtccattcgttaaatctatgctcatatctctgcccccttttcctgttgcttcgcatccccgacgttttcattctgaaatttattttaaatcaaatactgcgcattggcaaggttttcagggaacagaacccaaaaacagtaatttttttacaaaaaagagttgaatttctattacaaaagcgctataataattgaggttcgttcaatcagaacgaacacttgctggaatagctcagtcggtagagcacttcactcgtaatgaaggggtcgtcggttcaaatccgatttccagcttgtttaaaaagggttgaaggtttcggctttcaatcctttttgttttcttccaatattttcaaaaggtttttcataaacgaaaaagcgtacagatcgcagacttccttccactcctgcaatctgtacgttttttatttcctgtcaagtgattgtttttctactctgcaaaatcatccagaaccagttttgccgcaccacagattcctgcatcgttaccaagtgttgcaagggcaaattttacatctttattcgcaaagaacgcattctcctgaaatggcttttctacatattcaagaagaatctctccggcttttgataccccgccgccgatcacaaaaatggacggatcgatcactgctgccagatttgcaagagcacgtccaagataatttccgaaagactccgcaatctcttttgccactgaatcatctgctttcaccgcatcaaatactgattttgcagacagatcattcctgtttaaaatcgtgtttcttgtctcctgctccagttttctttttgcaagacgcacaatcccggttgcagatgcatactgctccaggcatccctttcctccacatccgcagctttctgtttcgtgaggatttactcgaagatgcccgatctctccgcctgctccgtggcttcctgtcagaatctttcccccaacaatgatgccgccgccgactccggttccaagcgttaccatgatcaggttcttatatccggccccgccgcctttccacatctcaccaagagcagctacattggcgtcatttccgacttccacatccagtccagtcagctcctccagctcttttttcacttctttgtatttccagccgagatttgcacttccaaagacgattccctcttctgtcaccggtgcaggaacacctacacctactccgataatatccgaatctgccagatcatgctctgcttttttctccttgagtgatgcagcaacatccggaaggattgcttttccctcttcttctgtgtgggtcttaatctcccatttttccaaaatagtccccgttgcctcgaacaagcccattttcactgttgttccaccaatatctactccaaaacaatatttcatcttcctgctctcctatttcctttttgtcaaactgttctgaactcttttatataattcctgtgcagcgttatatcccatctgtttctgtctgtggttgaccgctgctgactccacaatgatcgccagatttcttcccggacggatcggaatgttatggcatactactttgttgcccagaaattccgtatacgtctcttccagtccgagacgatcgtattctttttctctgctccagtcttccagtgtgatgaccagatcaatattctgtgtctccctgacgctctgcacaccaaacatggacttcacatctacgattccgataccgcgaagctcgataaaatgtctggtgatatccggtgcagaaccaaccagcgtatcatcgctgaccttacggatctctaccacgtcatctgttaccagacgatgtcctctcttgatcagctccagcgctgcctcgctcttaccgattccactctctcccatgatcagtacaccgacaccatacacatccacaagtactccgtgaatggaaatacacggtgccagttttacattcatccagcgaatcagctccgccatgaaagaggatgttgatttttgtgtgatcagaaccggtgtatccgcctgtgtagccttttctaaaagctcttgatccggttctaatgcacggctgaagatcaggcatggaattttatgcgataacagctcatcgtacatcttcatctttttcgcttcctcaagtgtctgaagatacgtatattcaacatatccgataacctgtacacgatccgagtcaaaatgatcaaaatatccggacaactgcagagccggtctgttgatatcaggcacctgaacatatttttcaaccaaatccacatccggtgtcagatttttcaggttcattttttctacaatttcttttaaacttacgccttgtcccataatgttctccttttctaagcatttcctgcgttcaattatatcacttatgaaaaaacttgtacacagattctgccgctttttcattcattgacggaatctgcgcaagctcttccaccgaagctgcttttatagcatccagactcataaagttccgcatgagcgctttacgtctcgccggtccgattccctcaatatcatccagaatcgaatgcacctgtcctttacttcttaaagaacggtgatattcgattgcaaaccgatgtgcctcatcctgaatccgcgtgatcaaccgaaacgcctctgagtttttatcaatggcgatctcctgattttcataataaagtcctcttgtccggtgatagtcatccttgaccataccacacaccgggatattcaaccgcagatcatccaaaacctgaagagccacattgacctgtccttttcctccatccatcagaatcagatccggaaaactgctgaaacctccgatttctttactttccttctgttcttttagcccatgggtgaatcttcttgtaagcacctcccgcatgcttccgtagtcatccgcaccttcaattcctttgatcttgaatttccggtagtcattccgcttgggctttcctctctcataaacaaccatggatccgacagactcaaatccattcgtattcgagatatcatatgcctccatgcggcggatatccgaaatcccgatcagtttttcaatctcccggactgctccgatggtccttccctcttctcttttcagacgttctctgtctttactgagaaccagggttgcattgttggcagccagttccaccagcttttccttcgtgccttttttcggcacgcggatattgacttttcctcctcgttttacactcagccattcttccagaagcgaggcatcttcaatctcttcctgcagcatcagttcgcccggaataaacggcgtccccgcataatactgcttgataaaactatccaggatctcaccgcaggtctctcccttggaaatccgaagatagaagtgatcccttccgatcaggcggcctccccggataaaaaatacctgaacgaccgcatcctcctcttgtattgctgctgcaagaatatctctgtcctctccgctgctgtctgtgattttctgcttctgagcaatcttttttacgcttccgagcagttcgcgatactctatggctttctcaaatttcagttcttccgaagccttctgcatcttctcttccagatccttcaaaatcccgtcaaaatttccattcagaaaacggatcacttctgagatagcttttccatattcttcctttgaaatatacccctgacaaggcgcatcacattgcttgatatggtaattaaggcaagggcgctcttttccgatgtcttttggcagattccggttgcagctgcggacatgatacaacttgtgaagcagatcaatcgtatctctgactgcctgaccgcttgtatacggtccaaaatatttcgccttgtctttgagcatctgtcttgccagcatcactctcggaaattcttcatttactgtcaccttgataaacggatatgtcttatcatccatcagcatggtattgtatttcggatgatgctctttgatcagattgcattccagtaccagtgcctccagttctgaatctgtgacaatgtactcaaatcgacgtatatgcgtcaccatctgctcaatcttcacacctttattccggctggtttgaaaatactgacgcacccggtttttcaggctgatcgcctttcctacatagatgatatgatcccgttcatcatgcataatataaacgcccggtttcgccgggagttttttcaattcttcctgtatatcaaaattataattttccatgccatttattataaatgcttttgaaaaaaaggacaagataaaaatcctgtccttctccgtctcatttattcttctgtaaactcgggaccttcttccgattctttgatatcttcctggttcttactttcctccggcatccaaacttcctgtgccggttcttccacaggtttcatcgcgattctggcttctttctttgtttccagttcttcgctctcttcgatcccctgcacctttcttaaaatcttcataaattcttttccggtgatcgtctctttctcgatcaggaattctgaaatcttatccagtgcttctctgttttcccgaagcaggcgttttgcctcttcatatgcagccttgagcatctccattacttcagcatcaatctccgctgccgtcgcttctccacagttcatcaccgcacggccatccagataacggctctgtacagactctaacccgatcaggccaaacctctcagacattccgtactgtgtgatcattgctctggcaacctttgtcgccttttcaatgtcgttggacgcacctgtcgtcaccgtatcaaacacaacttcttccgccgcacgaccagccaaaagtccgaccagcattgcttccagctctttcttagtgtttaagaacttctcttcttccggcgtctgcatcacatatccaagcgctcccatagttcttggcacaatcgtgatcttctgtaccggctccgcatctttctgcagtgcgctgaccagtgcatgccccacttcatggtaagatacgatccggcgctcttcctcattcataatgcggtcttttttctcttttcctacaagaactacttccacagcttcaaacagatctttctggctgacaacctgtctgccatgctttaccgctgtgatcgcagcttcgttgatcatattggcaagatccgagccaactgcacctgatgtagcaagcgcgatcgcctccagatccaccgtctcgtccatcttaacgtccttggagtgcactttcaaaatgtccacacggccttttaaatccggcttatctacgatgattcgtctgtcaaagcgccccggacgcaaaagtgccggatcaagtacttccggacggttggtcgctgcaagtaacagcagacctttgttcgtatcaaatccatccatctctgccagaagctggttcagtgtctgctcgcgctcatcattgcttcccatggcattgtcacgactcttaccgatcgcatcgatctcatcaataaatacaatacacggtgccatctgctgcgcctgtttaaacaggtcacgcacacgggatgcaccgactcccacatacatctctacaaacgcagaacctgaaagggagaagaacggcaccttcgcttctcctgcaactgccttggcaagcagcgtcttacctgttcccggaggtcccaccagaagcgcaccctttggcagttttgctccgattccggtatatttgcccggattatgcagaaaatctacgacttcctgcagggattcttttgcctcgtcctctcctgcaacatcctggaatgttaccccggtctgcttttcaacatataccttggcattgctctttccgattcccatcataccgctgccttttgacatcctcttcatcacaaaattcattaaaaggaatatcaggatcagcggaaggatcgccgtgataaatacttcgaatatcagcgaagacatcgtatccggtatattctgttcatactctactcccgcatcgtacaaacgctgggaaagtgtatcatcttttaccgcgcctgtataatagtcaggttctctctctcctcccgccgtcttttcttcaatctgctcaagaagctctgcagttgctgtattttcttcctggtttttcttgattgcttcttttctcgcttcatctgtgagcgtaatatagattttggcagaatcgatcgttactttttctacttttttctcatctaccatctttaaaaacttatcgtagctgatctcctgcgggtcgctcccctgcatcagcgaaaacagtcccataacgagaaacgccgtcagcagtgtcgtcacaagaatgacgccccatccctgacggttgtttttgggattgttcttattacttctgttgttttgattgtccattcttttcctcctaaagtccactatccccattataaatacaggtttcccataaatcaataaaaacattgtgaaaatattgtaaactcatccctgtttatagtatactgtatcagaaaagggtaaaacttctgttttcccttcttgtcacacgtaatactaaattgatagaggaatgaaatcatgaaaattggatttgataacgaaaagtatttaaaaatgcagtcagagcatatccgcgaacgcatcaatcagtttgataacaaactgtatctcgagttcggcggaaaactgttcgacgactaccacgcttcccgcgttcttccgggatttgagcctgacagcaagctccgccttttaaaacagctcagtgaccaggcagagattgtcattgtcatcagcgcaaaggatatcgaaaaaaataaagtccgcggcgatcttggtatcacttatgattctgacgtactccgtctgatggattcttaccgcgacaacggtctgtatgtgggcagtgtcgtgatcacacaatattccggtcaggaaagtgcctctttattccgccaccgtttggaaaatatgggaatccgtgtataccagcactactgtatcaacggctacccttccaatatcccgctgatcgtcagtgatgaaggatacggtaaaaatgactatatcgaaacttcccgtccgcttgtcatcatcacagccccgggtcctggaagcggaaaaatggcaacctgtctgtctcagttatatcatgagcacaaacgcgggattcatgcaggatatgccaaatttgagacattcccgatctggaatctgccgctgaagcatccggtaaatctggcgtatgaagcggctacagcagacctcaacgatgtcaatatgatcgacccgttccatctggaggcctacggaaagacaaccgtcaactacaaccgtgatgttgagatcttcccggttttaaacacgatttttgaaaagatttacggaaagagcccgtacaaatctccaacagatatgggtgtaaatatggctggaaactgtatctgtgacgatgctgtatgctgtgaagcatcccgccaggagattgtccgccgttactatgattccctcaacgctcttctgaaaggaaacagtccggaagaagaagcacagaaaatcgagctgctgatgaatcaggccaatgtgacgatccaagaccgccacgttgttgcagctgccttaaaacgcgcggaagagacacatacacctgccgctgctctggaactggatgacggacgtatcatcaccggaaagaccacgaatcttctcggcgcctcagctgcccttcttctgaatgtgatcaaagagctggccggattgaaacacgagctgcatattatttcaccggaatcgatcgagccgatccagaaactgaaagtggactatctgaaaagcaaaaacccaagacttcatactgatgaagtactcatcgcactttccgcaagcgctgccaccaacccggatgccagacttgcacttcagcagctttcaaaattaaacggatgtcaggctcatacttcagtcatgctgtctgatgttgatatccgcaccttcaaacgcctcggcgtccagcttacatgcgaagctgtttatgaaaccggatataattatcactaaaagcgatcctctcctgatgggagaggatttttttaataaaagaggaaatatttattgttcataaaaaagtacttgtatttttttgcaaaaagagagtatactccttttttaatatttttattcacatcaaatgaggaggatcactatggcagtaaaatatgtatttgtgaccggtggagttgtttcaggacttgggaaagggattacagccgcatcactcggcaggcttttgaaagcccgcggatatacggtgaccatgcagaaattcgacccttacatcaatattgatcccggaaccatgaatccggtacagcacggagaagtatttgtaaccgatgacggagccgaaacggatctggatctgggacattatgaacgttttatcgatgaaagtctgacaaaaaattccaatgtcacaaccggaaagatttactggtctgtcttgcagaaggaacgaagaggcgatttcggcggcggaaccgtacaggttatcccacacatcaccaatgagatcaaaagcagattttaccgcaatccttctgctgaaaataccgaaatcgcgatcattgaagtgggcggaactgttggtgatatcgaaagccagcctttcctggaatccattcgtcagtttcagcatgaaaaaggacgtgataacgtcattttgatccatgtaaccttaattccatacctgagagcctctcaggaaatgaaaacaaaacctacacaggccagtgtcaaagaacttcagggcatgggaatccagccggatattatcgtatgccgttccgaacatccgctggataacggaatcaaagacaagatttccctgttttgtaaccttccggcagatcacgttcttcagaatctggatgtggattatttatacgaagcacctctggcaatggaaaaagaaaaccttgcacaggttgtatgcgaatgtctccatctggactgtccaaaaccggatttaagtgactgggaaactatggtagacaatctaagacacccggtttccaaagtccgcatcgcactggtcggaaaatatgttcagctgcacgatgcctatatcagcgtggtagaagctttaaaacacggcggaatctacagccacacgactgttgagatcaaatgggtggatgccgagacagtgactcctgaaaccgcagatgagatttttaaggatgtaacaggaatcctggttcccggcggatttggtcaccgcggtgtggaaggcaagatcgaagccatccgctacgcccgcacacacaaaattccgttcctcggtatctgtcttggaatgcagcttgcgatcgtagaatttgcccgcaatgtgatcggtttccacgatgcacacagtctggaactaaatccatccactacacatccggtgatccacatcatgcaggatcagatcggtatcgaagatatcggcggaacacttcgcctgggtgcttatccatgtattctggacaaaacttccaaagcatatgaggtctaccagaaagaagaaattcaggaacgccacagacatcgctatgaagtcaacaatgattaccgtgaagttctgacagaaaacggcatgaatctgtgtggcctttctccggacggcaagatcgttgaaatggcagagatcaaagatcatccgtggtttatcgcaacacaggcgcatccggaattaaaatcccgcccgaacaaaccacatccactgttcaaaggatttgtggaagctgcggcggcacttgacaaacactaatatatacagactgataaccagcgactccttcacagagaccgctggttatcagtcttttttctttaaatcatccatttgtcatacgcaaactgataaacagaaattactcttccaacaccaatcatagcaaaaacggttccaagtcctactcctaccacagaatgtgcaaaacataatccaatgaatatggttgtacacaaactgataaaatcaacacagttttttgtaaaacctatatttttttgatttctgcagcaattgcctgtacaatgccatctcccggattaggaatcaagttcatgttcagcattgttgccgcaccgattcctgttaatacaatcgctaaaaacagtacaaataatcgaagcaagaggctgtattcattaaaatccggaattatatacgtaaacagatttaaaaatcttgtaaaaatcaggctgaatggaagttgaagtaaatctaataacctcagccttttatcctttttatgtaatatcatctcggtaattataaaacccgaatacaacaccagtgttcaaagaaattcttctttacaagaatttttaacactttctactaaaacatctttttcactgctttcaaccatttgatttgaaactattctttgagctaataattgaacatgtgttataaatcttgaatatccaaaatcattctcgttataaactaaatgaaaatgtaactttacaatatgcaggatattttgagtaatcttttccattttcaaacttaattcattaaatggatgatccacttgcccattaataaaatgaaatgctatatttccaatttcatctttcgggatttccacctcggttctgtcctgtattacttggatggcatagcatccaacatcaaattctttcggatttaacctttgcatttccctcatataataatttgaaatcacaacaccatctaacactctttttacgcaaaaggaaatatgatcagtcaacgaaagatataaataatccagtattttcatttcatacttatcaatcgcatattgaataatctgattcgcaatttcaaaatatatactttttgtatccaattcccttccccattaaaataacttcttcaccattttcatttactgctaaaatcaatgaattattcaacaccttaacaacttgcatattcccattctctccatttacccttcctgtaaaataactcaggctaaatctgctccatttgattggattactttctgataccaataaaaactatcctttttaatccgtttcaattctttcaaatcatcgtctgtacggtctacatataccaagccatagcgttttttaaagccttgatgagaacttagtaaatccataaaagaccacggacaatacccaaatacgtttactccatctgctaacgattcacgaatagctcgtatatgattccttaaataatcaatccggtattcatcatgaactttattgtcagatgttaaaacatccgcagtacccaatccattttctgtaatgatcaatggtaaatgatatctgttccaatattcatttagaacaatgcgtaatccgaccggatcaatttgagcgccatattcacttgccttgaggtttacatttttctcaattttccagtatccgtacatatcataatcaacctcattaaagccttctacacgttctccttttttatgttcttgtgtggcaggtaagtaacgggctgttagtgtacgataatagtttaatgcaataaaatccattttggctgctttcatgatttcggcatcccgatcttccattttgggaacgatattttgctctttcaaatattccatatagtatcccggatattccccattaaaatggaaatctagacagtagtccgttttgaactgattgttcatacgcgctgcccagacatcttccggtttattggtataaggataagtaaccgtactggaaacagctggcccgatttttccattttcaacagcctcatggcatgcattcgttgccagggcatgtgccagaaacatatgataatccatttgagcacgaattttttctttttttaatggatcggtttcacagatattcatacgttcatcaacacgcatcattaagttttgttcgttatggatcacccaatatttcacccggtcgccaaagttctcaaaacatattttagcataacgttcaaaagcatatgcacaatctctcgcttcccacccattgtatttttctactaatgcataaggcagatcaaaatgatatagtgtaataaatgggatgatatcgtattctatcaacttatcaatgaccttattgtagaaatcaattcccttttgattcacttttccatctccatccggaataatacgagcccatgaaatagaaaaacgatatgttttcatgccgagttctttcatgagatcaatatcttcatcccaatgatgataaaaatcacttgctaccttactgtctgcctgaagatgagatcttttaaaagaattgaaatcagctactgttttccccttgccgtcttcattccatcccccttcaatttgaaatgcagagctagaagctccccaccaaaaatctttttgaaataaatttgtcatcttaaattctcctctcgcttatttaatttccacacaaatcacttcgatattttcatcgacgtgaccatttgaaatagtttcaatacttttaaataaattagagtttgaaacaaccacaggaactgttacgtcatatcccgccttttctattgcttctttatcaaatgaaactatctttgttccttttgtaacatgcattccagcctgaacatgctgctcaaaaaattctccatttaaatcaacagtattcatcccaatatgaatcaacaattcaatcccactatctaaagtcagaccaattgcatgtttcgtcggaaatatcacagaaacagtacaatcttccggcgccagaacttcacctgttgttggaattacggcaaccccttttcccattgcttcactggaaaagacttcatcttttacattttccagctttattgcttcaccttcaaccggagatgtgatccgaatacttcctttttctattttaatactttcttccgattcagctttcttctccatatcttcaaatccaacaaaatatgtcaggattgctgctcccaaaaaagctaccagaataccgatcaaataggccatgaactgatataaggctgttccttccccataatacgtcataatcgtcaaaataccattattagcaaatcctgtattcactgcacttccaagacccatgatagcaccaccgattgctcccgcaataactgcacaaaacatcggctttttcaaacgcagattacatccataaattgcaggttctgtgattccaactaaaaatgccggaatcgttgccgccatagcaatttgttttaaatctttgtcttttgtctttaacataacacctaatgaagctcctgcctgagcaaaatttgcagaaccggcaaaacacatcaatgtattcgttcctgtaatcgccacatcatttaatccaatcggaagcagtgcccgatgcgctccaaagataacaaaaacgctccataaaccaccgacaattgttcctccaagaattgggctgaatgaatatagtgcctgataaagccattgaatcgcataccctacataaattcctaccgggccaacaacaaccagcaaaaccggaagcataataatcagagaaagaccgggaaccagaataatctccaacatatctggaatccattttttcaagaatttctcaagatagtgcaatacaataacagccaaaataatcggaattacagattctgtataagagaatacttttgttgcctcaccaatcgtaaatgctttttttataactggcaatccaaaaatagtgtttactgttgaaacatcttgaatcaatgcatctataaccggatggcacaaaaatgctcccagcaccatagcatttattttactacaatttaaagcttttgcactggtatatgctaaaaatatcggcatatagtagaaaataatattgctggcagtatttaataaaatataagtactgttcgtatcactgatccaccccaagcgagttgcaacagacaatagtcctttaatcagacccgaagcagctattgccggaactaatggagtaaaaatttttgaaatcgtctgcaaaatacgatttcctaatgagcccttatccgctttgatttcatttcccttttcacgattaaccataggtaaaattgcttcgtatactttatcaacctttgtaccgattacgacttgaaactgtccgtttgcttcgacaacttgtataacaccttctaacttttccacaatttctttgtttgccagctccttgttctttaatacaatcctcaatcttgtgaagcaatgagtcacatctgcaacattttgagcaccaccaacatttttcaaaatgttacctgcaattacattgtaatccataatttttctcctctcgctatctattgatttgaatgattaggcctaatcaggttatttaaaataatgtataaaaaaagattgaacacacaaacacaatactccctaggaatatgatatttgtcaattcaatcttgcctgctttaccagtaacacgtatccttgtacattatttatctttaaccaacttcaatataacattttcaaacgatctttgcaagcattttcttcagccctctctccttcctttcatttcccttcgcttcacaatcctcactgctccccatgcagcaaacgcccccacaacagctccaccgagcacatccgtcggataatgcacgcccacatacaacctggaaagagagatcagcactgccagaattacaagcggaatcccccactttctctccaaaaacggatacatcgccaacgctgctccaatggaggcacaggtatgtccggaaggaaacgaaaaatctgactgcggctcgatcaaaagcttcagtccttccaccacttcatacgggcggattcttgcaatgatgtttttgagtgccacgtttgtgatcaatgctccgatcgccagcgccgccaaagcagcaattcctgcttttcttgtttttttcggaatcagaagcacgattcccaacataatccagaaccaccctgcatctcccagatgtgtgattgtcttccagaatccgtccatccacacctgtctgatatgctcctgaataaacaacaacgcctgtccatcccattgtaaaattgcttccattcacctctccttctcctataccaaatcctgttcttcaaataacgcatccacaactgcttcatacagtttcaacttttctgcttttttaattttcttggcatacttctcatactgcgtaaacaacggcgccatataaaaccacagctctttcatcttgaagagtaccgttttctccccaaaaagaacttcctgatattcccggtaaagttcatcatgaaatgcccggattctgtctttttcaaccggtatgccttgtctgatcttccgaaccagccccggatttttcaggattcctcttccgatcatcacagatggtacctcctggaaacggttacagattatttcatattcctcttttgtgcaaatatccccattgtaacagagtggatttttactgtttttgaccgcatattcaaacatttccagattcggagtgttcttatagaaatctgtctggatccgcggatgaatgatcaactcctccattggatactgattgtaaatttccagaagccggatccattcttccgggctctccttgccaatccgtgtcttaaccgaaatacggatcggtgtcttttcaaaaagctcttctaagaatgcattcaatctgtccggctctgccagaaatccagcccctcttcctttgctcaccacggtttttgacggacatcccagattcagattgacttcctcatacccgtattcccccagcctttctgccgtctttataaaatcctccgccgaattggtcaaaatctgaggaatcgcacacatcccctgattgtgcatgggtaagatatcgttcttttccctggaactgagctttcctttctgattcggtttaataaacggaataaaatatttgtcaattcctccaaaatagtgttcataagcctttctatacacatatccgctgattccttccagcggtgcaaaataaaatttttccacaatattctcctgattcttttttgtttcgctccattatagcatatattcttttatttgacacccatctgtcaaaaaacggactccgaagagtccgcttcattttgacaatattacatcaattttgtatcttccagtttttctataaacaattcgttcaggcgaatcaccggttttcgaagcaccagtcccaaaaacagggatgccagaaggaacagacacatgattcccaattctgcccagtacgtatactgatagaatccggcaacacattcccgcatagctgtcatactgtgcgtaaatggaagaaacggataaatcttctggaagatttccggcgccacttcgatcgggaacgtaccgcctgatcctgccacctgcataaccagaagaaccacacagattgcttttcctacatctccaaatgataccgtgaacgtataaataatattcacatataccacactgcttacccagcctgccagaaggaacaaaaacggatgctcacactggattccaaggaaatacagatctcccagacagatcaggccgctctggatcagtcccagcacgaggaacagcaggtatctgcccagatagatctgatgcggcttcaatggcgcaagcgctctttttaaattttccgaagctgtcactttcatcattgctaccaggatgatcccgcctacccagatagagagtgtagaatagaacggcgccatggctgatccataattttctaccggatacaaggcttttgtctgcattcttaccggcgcagacacaaagctgctgattacttccgggctgcttccaagcacattttttaatgtctccacatttccgtcctgtgctgccgtatccagcttttctgctgcctggtttaccttttctgccgtctctgtcaaaagggaagcagatgtatccagtgttgttttcatcttctccagaccggatcctgcatccttcgccagtttttccatatcttcgactccattgtccatactggtgaacaaagactgcactgcactgctggtatcccccagtgtgccaaacatggtattgatctgtgtttttacgttgttttcataatccgaacggatccccgagatctgctgagaaccctgcttcaccagctgatccagctgtacctgatagtttcccgcatcacttgcagtctccgtaatctttgccgccgcttcattcaatttatcccttaccgcttcctggtgggcaatggattcattcaggtttccgatgatcggctggagcagatccgaagcaagcggaaaggaatctgcaagctgctgcacactgtctcgaaatcccgtatagcggtcaatcataacctgtacttcggatgccacgctgttgagtgcccctgctgttgctcccgcacccgtggatatcgaagaaaatgcattgttgatctgtccggatatggcatcatagcactgacttccctgtgccagtacctgattgacactctctgttgttcccgacactgcgcttcttaatgagtcaacagaatttccggtctcattcagaagtgacagatttgtttccgtattctgccccgctttatttaaaatatctgcagtggcatccagcatctgctgcatggaaaccgtcaggttcgaaaacgccttcaccgtaccggctgttgaatccagatccgctccgatcttccggatattttctgtcagattctgtgctgctgcctgtgcgccgtcactgctggtcacttctgagattgtatccagaagatccagtcccacctgcgccgctgtttttacaaaaatctcatcgatctgctgctgtacggcacttgctcccttgtcagtcacttttggagcaatggcattttctttttcattgatataatatataatatcggaatgtgtcatctcctccgaaaacaggctcatcatatcctgactgaaacttttcggaattacgatcgcggcatagtattttcccgatttgacaccttctactgcatcctttttccctgtaaacgtccagtccagctggtcattttctctgagacttgagattacagtatctccgatattgatctggagaggaaggatttctccttcatacccttcatccgtatttgcaaccgccaccttcagaccatttgtattggaatatggatcccagcttgcagcaatattgaaccatgcataaagagacggaacaacgcacaagccgagcactacgatcattgcgatcacattttttttgatatgtgaaatatcataaagaaaaacttgccctatcttcttcatgcttcttcctcctcttgttctttccgttttctcagtgtctctaacaattcctcctgagacatccgactcaccttcagtctccgtttcagactttcatggagatattccacgcagatcagataaagcgcgatcacaatgatcgatgtgatccacaacaccagaaataccattttggaactgatactgaacatcaggatcaaaaagatcagcggaatgatcaagatcgccgcaaatcctctgcggatccgtttcttataatttctctcaaaccgttctgccctctggtacatctcttcccggaatgttttcttgtctgccagcgcactcacaactgctgtcatacggaatctctcttttgtcagaccttcctcctcacagatcatcagctcagtctctcccagtttctggtcaaacatatggttcagattcaaaagccatggacgtacgacaactccgatcaaaagcgcaatcggaacatacactgcaagacacaacaaattctctgcataatggaatccatatattcctgctaccgcttctctcatcgcattgattccgtatgtaaaaggaagcagcggatgcagcttctggaaaaacgccggtgtcatctcgatcggataggttcctgcagaacccggaatctgaatgatgaccagaattacactgactgcctttccaatgtgtttgaatgtaatagaaagcgcataaataatattcacatatacaaaggaagtgaacaatcctgcaaaaataaatgccgcaggtgacttgcactggactcctaacaatagcagatctcccacacagatgatcagcgactgtatcagtcccatcaccacatatagcatccatcttccgaaataagactgaactgctgtaaacttcggcacgacttcatctttatcagactccagtttgaaaattgcgatcaacacaatcccccctacccagatggcaaggtttgtatagaacggagtcatggcgcttccataatttttcaccggataaaaggactctgttttcagagctaccggtgcagacataaactccgaaactgcttccgaatccaatcctgtcagattcagaaaatcctgataggactgggaacttctgagcgcattcagatctgctgttactgaattcagtttttcctgtactttctgaagcgcatttcctgtactctcaagtgccgtcttggagtcattcaggcttgtattgagattgtcaagaattcctttcgtctgatccaccagtggatccactccgcttaacacaccggagagttttccggaaagctgtccgaaagaatccagagatgtgttcagccctggaagtacattctgctcaaagctgcctttgattccacgaagctgctgctgattttcctttaccagactgccaatctgctgtgctgtatccgttgccgtctgagccgcattgccgattcccgcatttcctgcctgcagactattcaaaagctcctgatgtctctggttctctgcctgcagctgtgcgatcagatctgatgccggactgcctggtatggcactgtccagctgtgaaagcagatcaatgatcttttcattcagctggatcacactgttgatggaagacatggcactgtccacttttccattgactgactgaatcttttcattcagacttcccaaatctgcccctgcggaattcccgatgtcggacagaagattctccccatccgtcagcgttccagatagtgcagaagaaaatgatgagacactgtttcttcctgcctgaagtgccgaagcccctgcatccagagcagcagcccctgaggaagcagcgcttttcacctgatccatggcagactgcacctctttgatctgcgcatcactgtcctgaaaggttgcctggaactcagacagtatctgctgataacttgcgatattgtcagataccttctgaatatctgaaactacattttcctgcagcgaatccagattgcccgctgcatctgcaatcgaatctttaaaaatttctgaaactgcttctgatgcagcagatacaaatgcctcattgacctgactctgcaccgctgtcgccccactgtccgtaattttcggtgcgatcgcatttttcttctcattcagataataagtaaatttaggctgttcaatcgttcccgtcagtacactggtcagggattcactgaaatcttccggaatcacgatcgcagcataatacttgccggatttcaccccgtctacagcctcttcttttttcacaaacttccagcccagatcatgattctccttcaactgatctacaatctcctcacctgcattgagcgaaccggtaagttcattttctgttcctttatccagattcgccaccgcgatctgaactgctcccgtatttccatagggatccatattcgcagcaatattaaaccatgcgtacagcgatgggagcagacagacgccagccacaacgatcattgcgattggattgtgagccagccgtctcatatccctttttaaaatctgaaatgcgcgcttcatcttcagcctcctttaataaacactctgtccatagtagtgtattgtatcataaaaagaaccatttgggctattgcaaaaaaagatgaattttggtcagaaattttactcatttttaacaacaagccacttattttctgttgattatctcttttttatcaaacggaaagtatattccaccttccattctttttaacaacaggcaggcaatcacggctgaaaccagttccgccaccggaaaactgatccagattcccgccgctcccattgttcgtgacaaaagatatccaagcggaaggataatgaccagctggcgcaaaagtgaaatgatcagagaatctccaccccgtcccagcgcttcaaacacaccggaaaagatcacacctgctgacgacaccaaaaatccaagcgaaatcaatcgcagtgcctccattcctgcacgcatcagctctgcatctgcctggaacatactcagaatgatgtccggaattgccagagaaacaaccgttcccaccagcatcagtactgccgcagaaatcagactgtagcgtatcgtatcccgcacccgtttctttgatccggctccgtagttatatccgataatcggccgcattccctgtacaattccattcgccggcatataaataaatgtctgaagtttgaaataaattccaagtactgctacatacgtatccgaaaatgcagccaggattccatttaatccgcccaccagaacagacggcatcgtcatcatcagagaagacgggattccgaccgaatatatctgacggatcagccgccagtccagatgcagatatttgggatgaatcgtaacacccggattttttcgcagataaacaacaatatatagaagaaatgcgctgatctgcccgatcacagttgccactgccgccccttttactcccatttcaggaaatccaagaaggccgaagatcaggatcggatccaggataatattaatcattgcgcctgctcccagaagtatcattgtcgttttcattgctccgatgccctgatagattttttccatcgcgatctgaagcagagaaccaaacgaaaagcaaagaacaatatacgtatagtcacatgcctgtttcatgacctcgggttcctttgtaaataatccgataaatggttctgtgatcacaaggcccaggatcacaaacagtacacaatggatcagcgtaagtgccatccccattgtagcagcctcatttgcccgtttctgatccttttttcccagactgatcgataagacggaagcaatcccgacaccaattccgactgccacagacagcacgatattctgcagcgggaatgccagtgacactgccgtgagagcccctgttcccagatacgatacataaatactgtcaataatgttataaagagactgcaccagcatggacaataccatcggcagagacatgctcatcaaaagcggaaaaatgtcccttgtctccatcttgtttgtttccataataccctccattcctcaaaaaaagccatgtgtttctgtttattctgaaacagaaaaaccacatggctttgtacatgacctatttttttagctttgacagcatagcatatctttttctttctgtcaattgctttttccaggatacggcttgtgtctcatttttaattatgatactatgatttcgtatggacatcgaagcggtccatcagcatacagatagaaagaggggacatttatgcacacactgaaaaaatttatccattactacggtccatataaagccgttttctttctggacctgatctgtgctacgatcatcagtctggtcgatctggcatatcctcagatcctgcgtacctgtaccaataccttgtttacaaaaagcagttcctctattttaagcgcactgcttcccattgcagccggtcttctgatcatgtacctgatccagagcctgtgcaaatattatgtcagctatcaggggcatatgatgggtgcttatatggaaagggatatgcgtcagcagctttttgaccactatgaaaaactttctttttcttattatgatcagaacaactccggacagatgatgagcaaacttgtctctgacttgtttgatattgcagaatttgcgcatcatggaccggagaatctgtttatttccgtgatcaagatcatcggatcgttcatcttcctcttcctgatcaactggaagctggcaattccacttctgtttctggtgttttgcatgtttgcattttctatgagccagaaccgccgaatgcagtctacctttatggaaaaccggaagaaaatcggagatgtcaattcccgtctgcaggacaccctcgccggaatccgcgtggttcagtctttcgcaaacgaggatgtggaaaaagaaaaattccgcaagagcaatcacaattttctgctctccaaggatgccaactacaaatgcatgggcagttttatgggctataacctgtttttccagggaatgatgtatcttgtcacactggtattcggcggctacctgatcgcaaaaggagaaatgcaggcgacagatcttgccatgtatgcactgtatatcggaattttcatcagcccgattcagattctggtggagcttacggaaatgattcagaaaggcttctccggattcaaacggttccttgccgtgatggagacagagccggaaatccaggattccccggatgcaaagccactcaaagacgtccgcggactggtttccttcgaggatgtatccttccactacagtgatgacgataccctggtattatccaacgtttccttccagattccggcaggaaaatccattgcccttgccggtccgtcaggaagcggaaaaactacaatctgctcccttctgccaagattttatgacgtgagcagcggacgcattacgatcgacggcaaagatatccgtgatctgacattagagagcctgcgaaaccagattggaatcgtacagcaggatgtctatttattctgcggcacaatcaaggaaaatatcgcctacggaaaaccgaatgcctctatggatgagatcgtcgatgctgccagaaaagcaaatattcacgatttcatcgaaagtctgccggatggctatgacacctttgtgggagaacgcggaacccgtctttccggcggtcagaaacagcggatctccattgcccgcgtgttcctgaaaaatccgccgatcctgatccttgatgaggccaccagcgcactggacaacgaaagtgaacgctggattcagcagagtctggaagttctcgctaaaaacagaacaaccatcacgatcgcacaccgactctccacgatccagggagcagacgagattcttgtcattgctgacaatggaatcgcagagcgggggactcacgaagaactgatcgaaaaaaacggaatttatgcgcactatttaagagcataaaaaacgtacatcctgtaaggataactctccttctggatgtacgtttttcattttagtagttttctgcgtgaacctcaaaatagctctgcgggtgattgcaggtcggacaaatttccggtgcttttgttccgactacaatgtggccacaattgcggcattcccatacctttacttcacttttggcaaatacttctgccgtctccacattctttaagagtgcacgataccgttcctcatgatgtctctcaatcgctgctaccagacgaaatcttgcagccagctccggaaatccttcttcctctgctgtttttgcaaatccgtcatacatatctgtccactcgtaattctctccatctgctgccgctgccagattctgtgccgtatcgccgattccctgaagttctttaaaccacatttttgcatgttctttctcattgtttgccgtcttcagaaacagatctgcaatctgctcatatccttcctttttggcaacagaagcaaaacttcagttcagaaatttcagaaattcttccgcctgtttttaaagcatcttttcgttatctccctatcagaacctgctttccgcaaaaagcaaaaccatgcttcctgcattggcgtatcgtattcatctaattcattgtcagtgtttttccgaagcggcgcggccgggtaattaaagtaacacgatttcttctctcccaccactcttttataaattgtgttttatctacataaaacaaatcgtttataataatatcctcaaattcctgatatccaattgatactcttcgtgccataccctagcctcccttctctgcataaattcaattatagcccttttccttcataatcacaatggagatcttcttccaacatctgataagaaaagaaaccatcaacaaactcaaaaaatacgtctcttacagttttactgtaaaagacgtattttatactgccttactcgatcacctgaatccatcctttgggtgcttcaatctgccccatctggattcctgtcagtgtgtcatacaatttctgaatggtcggtcccatcttttccattccgctcgggaagcagatctcttttccgtgatccacgatctttccgaccggagagatgaccgccgctgttccacacagtccgcactctgcaaactctttcacttcatccagatacacatcccgctcttccacttccagaccaagataatgctctgccacatataacagagaacgtcttgtgatagacggcagaatcgtatcagaatgcggtgtcaccactttattgtcttttgtcacgaaaataaagtttgccccgcctgtctcctcaactttcgttcttgttgccgaatctaaatacatgttttcatcatagccgttcgcatgtgctgtcacgatcgcatgaagactcattgcataattcagtccggctttgatatgtcctgttccatgcggcgccgcacggtcaaaatcagatacacataacgtcaatggttttactccgcctttaaagtacggtccgacaggtgtcacaaacacccggaactgatactcatctgccggcttgactccgatgaccggattgcttccaaacatgtatgggcgaatataaagtgttgccccggaaccatacggaggcacatacgctgcattggcttttaccacttctttgactgcctccagaaaacgttcttccggaaataccggcatctccaaacgtctcgcagaatctgccatccgggcagcattgagatccggtctgaatacaacgatcttaccgtcttctgtcgtataagctttcattccttcaaatacagtctgtgcatactgcaggactccggcacattcattgagtaccacaccggcgtcttctgtcagtcctccctcatcccattttccgtctttataattggaaacatatctctgttcagtctgtacataaccaaatccgagattctcccaatcgatctgtttcttctccatcaaaaactcctccattcctcaatcgaacgtatttgcaacttgtttgttgcaattataatactctcacgctcaaaaatcaagagtgcgctctgtttttttatcgttccatcatactgatggattcaatcccgacacttccgcctctgacgacttcaatacttttgaattcttcttttatcagcttcaccactgcgtcgtttttcgtcccggtctgtacaaattccagaagcaggctgtctctgtcacagtcgatcacttttcctttaaatgtctctgcgatctgatgcagctccactttctgatccagtgtacacttccggactttgatataaaggatttctttcatccgcacaaaaatatctgtaaaatcgatgaccttgatcacttctaccattcgattgagctgctttttgatctgctcaaatgtctcatcatcactgactgtggcgattgtcattcgggataccgtcggatcttctgtggttcctactgtcagactgtccaagttgtaggattttccggaaaacagaccggaaatcttagaaagcactcccacctgattttccacatacagagaaatccatctttttttcatacttttatctgccatcgtccgtcttcctcctaacaatccataatcatatcttccagtgttccgcccggcttgatcatcggatataccatctcttccggatcaatgataaattcaatcagggtcggagtttttgtatttttctttgcctcttcaaatgctgccgagatctcttctgtttttgtcacacggattccttttgccccatagctttctgccagttttacaaaatccggcgtatactccggaaattcagctccatctgtccgtctcgaaagcgctcctgcgcgcagattggtcatcccatagcgttttccgtaaaacagcttctgccactgacgcaccatccccagatatgtattgttaaatacacaggcgatgaccggtgtctcctccagaactgccgttgcaaactcctgaatattcatctgcataccgccatccccggaaactgcgatcactcgtttctccggattaccgatctgtgctccgatcgccgccgggaatccatatcccatcgtccccagtcctccggacatgacaagctgcttcttttctgtaatctccgcatactgagacaccagcatcatatgctgaccgacatctgtcgtgatgattgcatcgtcaaactgacggttcatctcttcaataatatccagagggctcatcaatgcatgccgtttcatccgaagcggatgctcctctttccatgccgcgatctgcgcaagccatttttttgtctcgcactcttccacatactccgtcatcttcgtaagcgcttctttggcatctgctacgattggaatatccacatgaatatttctggaaatcgatgccgtatcgatatcaatatggacaatttgtgcatgaggcgcaaattcatgcagttttcccgtgatccggtcattaaagcgcgtcccgatggaaaacagcagatcacagccgctgactgccatattggctgcataagcgccgtgcatccccagatttccgataaacagcggatgatttgtcgcaatggcgcctcgccccatgatcgttgtcactaccggcacctgtgttttttccaccacttctgtaaacaatgcactggcgcgcgcaatattcacccctccgcctgccagaaacagcggtcgttttgccttgtgaagcatcttgatcgctcttttcagctgtccgatatgtacactggtattcggcttatatcctctgatattcacctctttcggatactgtgcactgccaagctccgccatcacatctttcggaagatcgatcagaaccggtcccggccttcccgttcttgcgatataaaatgcctccttgatgatccgtccaagatcttcccgcttcgtgaccgtcacaccatacttggtgatgctccgtgtgatccccacaatatccacttcctgaaatgcatcatttccgatcagatgtctcgccacctgtccggtaaaacagaccagcggaacactgtcataattggcagtcgcaagtcctgtcaccagattggtcgctcccggtccgctggtcaccagacagacgccgactttccccgttgtcctcgcatacgcatccgcttcatgcaccagtgcctgctcgtgtctcggaaggatcacatcaatcccgctctgcttatacagctcatcgctgatatcgatcgtacacgcgcccggatatccgaacaatacttctacgtcttcttcttttaatgcttttacaaataatttgtttcctgaaatctgcctcacctttcacaccctccttatgcaaaacgccccaagctgtcaaaaagctcagggcgaataaaattcctcatacactgaatttcagaggctttcgctgctgaaatttatcctcattatacggtgtatttttatctttgtcaatttccttttcttgatcttttttaatccaattcgcatttacttcccgttgtttctgtttttcagggctccgatcacactgtagacagccagcattgccatattgaccacaactacactcgcacctgccggtgttgcatacacataggaaatcgtcactcccagaatcaggcatacaaccgatagaatcgctgaattcagaatcacacccttaaaggtcttaaacacccgcatggaagtcagcgccggaaaaataatcagactggagatcagaagtgctcccatcatccgcattcccaacacgatcgtaactgccgtcaacaccgcaatcagagtattatacagatttgcacggactcctgttgcccgggcgaaagtctcatcaaaggtgatcgcaaaaatcttattatagaaaaacagatataagatcagcaccgcaaccgacagaagaatactgaactgcacatcctcaccactcatggcaaggatacttccgaacatatagttataaacatcagtgttcattcctgtcgtcatggaaatcaccataatcccgatcgccagtgctcccgtagaaatcagtgcaattgccgcatctcctttgatcttgctgctgccgctgatgcgaagaagcagaaccgcagccacaacaaccaccggaattgcaactgccaaaggcgccatgttcagcgcagccgcgatcgccagcgccccgaatccaacatgagaaagcccgtctccgatcatcgaatagcgtttcagtaccagactgactcccagaagtgctgaacacaatgccaccagggaacccaccagaaacgcccgcaccataaatggataggacatcatttccataaatgtatcaagcatttccctcacctcccagaaatctcttgccgactgtactgttttgatattcctgcgcagtcccgtaaaacagggcgctctcctgcaaatgcaggatatggcttgcatactgtatcgtactttcgatatcatgagacaccatgacaactgcaattttagcctccttattgattttttcaatcaactggtaaaactctgcagtcaccagcggatccagtcctgtcacgggctcgtctaacaacaggagcttctttgtggcacacagcgctctcgccagcagtaccctctgtttctgtccgccggaaagatctcggaagcactggtgttccatttcccggattcctaaaagctccatattctctctggctgccttcttatccgctgcgctgtaaaacggccgccagcctctgctgttgagtctgccggaaagtaccacctcataaacgcttgccggaaaatctttctgcacgaccgtctgctgcggaagatacccgatctcgtcttgcttcaatccgtctcccagcagaatctgccctttaaagggcggttttaatccaagaagactttttaccagcgtactctttccggaaccattctctcccacaatgcagagataatctccctgctcgatccaaaaagacagatcccgaacaaccgtctgtccctcatatgcgatcgaaattccatcacattttatcaatgccatcagttcaaagcctcctttaatgtttctacattctttttcatcatgctcagataagtctccccgtctgcaaattcctttgcagtcagattgtgacaactgtaaaacgtcttcactttcgcatgtgtcgtctcggcaatggcatttgcaatattctcattactcagctccatctttaagatcaccggaatctgttcttcctttgctttgttgatcagaaatgccatcgttgccgcacttggctccgtatcggatgcgcagcccggaaatgccgcatagtatttcagaccgtattcatctgcaaaataccgaaacggaaaacggtctccaaaaagcagcacatcgcgtttggccgaacttaccacctcacgaaactcatcatccagctcttctaaaagactcacatacgctttttcgttctcttcataaactgccgtctgctccggatccagctctcccagcacctcggcaatctgttccacgattgcaatggcattctctggagacgtccatacatgttcatccggagtcagcgtctcatgtgtttcgtgctcctcttccccgtgctcatgctcgtgctcttcctcttcttcatgttcatgaccacgttcttctttcatcccttctacgtgttcttcatttaccgtatccacgcagtcgatcaggcgaagtagtctgatatgctctgtatcgatggagtccagaatatcctccacccattcatcgttctcaccacccacataaataaacagatcacaattctggatcttcagaatgtcctgcggtgtcggctcataggagtgtgtctcttctcccggctttaaaagcatcgatacttctacattatcccctgcgatctgacgtacaaaatcatactgtggaaaaatggttgtcacgacatttactttctcttcgccggtctctttcacagcccccactctctgacatccggccacacttgtcaccaaaagaaacacactcagcagcactgccgcctgttttctcttgtatgtttttctaaatttcatgatatgcctgccttcactgtcggcgctcgtaagtcgaaaatacatactccagatcaaaacaagtatgctcttcactgacttctgtcatttcccagtcttccagctgatccagattcgggaaatacgtatctgcctgatatgcatggtcgatctttgttacatatactttgctgcaataaggaagcatcatacggtaaacactttccccgccgatcacaaagatttcttcctcatcatattttttcagttcttccagcaattcttctgttgtatgcacgatcactgcatctttcacatgataattgggattccctgtcagcacaatattggtgcggttcttcagcggcagaccgtttggaaagctttccagcgtctttcttcccatcacaactacctttccacctgtcatctgacggaaaaacttcatatctgccggaatgctgaccagcagtttgtttttatatccgattgcccagtttttatcggctgctacaattgcattcatattcatttcctcctttttttacacaacacctataccgcgattggaatattcttaatctgaggatgtgtctcatatccatccagccgtacatcatccggtgtaaattcataaaagtcttttacctccggattcagccagaatttcggtgccggaagcggttctcttttgatcagttcctcgatcatcgggatatgtctgtcataaatatgcgcatctgcgatcacatgaacaaactctccgaccttcatatcacacacctgtgccagcatatgaagcagcaccgcatactgacacacattccagttatttgctgccagtacatcctgagaacgttgattcaggattccatttaatgtcagtttgtcgctgtccttttcttttgtcacattaaatgtcatgctgtatgcacatggatacagattcatctcatgaagatcctgatgcacatagatattcgtcatgatccgtcggctgtaaggattgttcttcagatcatagatcacacgatccacctgatccatcattccctctttatactgatgctttacctgcatctgatagccgtaggcttttccgatggaaccgtcctcatctgcccagctgtcccagatgtgactgtttaaatcatgaatgttgttggactttttctgccagatccacagcatctcatccacacagctcttgattcctgtccttcgcagagtcagtgccggaaactcttttgagaggtcataacggttcacaacaccaaattttttgatggtgtacgcagaggttccatcctcccataccgggcgtaccttttctccctctgtactcgttccgttgtcaataatgtctctgcacatctctataaatactttatctgcgtaactcaatcttatcttccccttctaatattctctgatcatactgctgatctcagaaatgctgtccattttctgcagctctctcagcgcatccttgatatgatactctttcactttttctgtactgatgaccagttcagccgcttcttcctgtacatgcttctgcacaactctgcggatacttaccttgtgaccgccaaatacacttgccactttcgccagaactcccggttcgtttttcacctgcattctgaggaaaaatttatttttcacttcatcaaacggcttcaccgacaaatcctgatagcaggtacagctgattcttccgttgcatccaaactgcaggtttctggcaacatcaatcacatcaccgacaacagcacttgccgtcggcatctccccggcacctcttccgtaaaacatcgcatcatccacagcatctccgtgcacaaaaacagcattgaacgaatcccgcacggacgacaggggatgctcttttccaagcagcaccggatacactcccacttcaatccctttgtccgtattgtgcgcaactgcaagcagcttgatcacacagtcaaattcttttgcataggcaatatcttctgctgtgatctttgtgattccttctgtataaacatctttaaactgtactctggaatgaaaggcaatggaggaaaggatcgcggcctttcttccggcatccagcccttccacatccgctgtcggatctgcctctgcatatcccagctctgttgcttttgcaagtgcagtcttaaaatccatattttcttcaaacatcttggttaaaatatagtttgtcgttccgttcacgatccccatcacttctgagatctcatttccggcaagacactgtttgagcggacggatgattggaatagcgcctgccaccgatgcctcaaacagcagatcacagccatgtgccgccgcaaggtccaaaagctctcctccgtgttctgccatcagatctttattcgctgtcaccacatgctttccggctccaagtgcttcctcgatcatggactttgccggttcgatcccgcccatcacttcaatcacaatctgaatctccggatcgtttacaatcgatttccagtccgttgtgagaagctctgtatccacaccttctctttttttatgcagactgtgtaccaggatcttttccacttccagctcggcgccgactgtgtgtatcatactttctgatctcctctggatcaatttgtacactccgcctccaactgttccaagtcccagcaatgccactttgatctttttattttccatactcttcacctctgtttttgaatccactgtttttctttgctccgtctacagacttctgtttctatagagtaacaaaatcttttcgaaaagtaaagcggacattcttctgtccgcttctatctatagctgaccttattgaaaggcaataccatataattcacaggcctgtgtaaacaatcgctctgtgttttctgttgcctgagaagtattcaaagatacactgctcaccagaatttcccggtcctccatcaactgaacctgtatgatctcagtacacggataagccactccatctgccccgatctgattgcagatcagctgctgcatcacgaatccgtcttctgctaccatctcacctacagtaatatccgtatagattcccgcctgactttccaatgtctttcggatattttgcacttctgccgagattctctgctcaatcatttcatccgcagccagaagtgtaaaacctgctttcagctcaattccatcttttgcggaagttgctgtggactccgtaactgtattctccccagccttgaacaatgtgacatccgtaacccattgataaccatccagggatactgtctcaaaatcctcatatccttcaatcggagtgccctcatattctctctgaacgccctcctcttctttcacatctggttcttcctgtgtttcctccggaacttcttgtgaaatcaccgcatcctgtgtctgttgtactgtcagatctgaaactgcaaacaggcccagtgcgacaactgctatcacttcaagtaccaatagaatgataccgattccgccagtgatcgcactggctatgatcgctcctgtacttttctccggatccggacctgtatactctgcctttccaaacgcaaggattggaagaaagacaatacttaagaaaatcagcccacaggcaaatccacctttctttccaaatacttttgccagttttatcattgtaaaaattgcaaatatcagattccccagcggcaggaatccaaaaataaacagccatcctctcccccaggttatcctggtcattacatacaaattataaaacgggatcaatgacgcccatccgggttctcctgctttacaaaatactttccacattaccgcaacacaaaaaatcataagcgccaatgctacaattatcattcctatcgctgctgccatcataccttttcctcctgttccttagctcccttatcccttttgatctctatttcattctcctcttttggactgaagaatgattcttttcgattttaacacatcagagcaaaaaagtcgatgagaataattctctttatattataatatacaggcagggattagtgtaaacagtaggatttgaacatacaattagaaatttcaaaaaaattaatttttttcaaaaaagttgttgacagatcagaactcctgtagtatagtatatattgttccgaggggaacacaaaacaaacgcgatagtggctcagctggtagagtacgaccttgccaaggtcggggtcgcgggttcgaaccccgtctatcgctcttataggactgtgaatcgaaagatttacagtccttttttcttattcaaattctgtttttcccgatatttctgttatttccgtaaaataagagaagctgcgatctactcacagcccctcattttctgctgcccttttcggacaagtttctcttttattcttctgtttcttcctgaatatccagtttcagccccagttcttccaactgtttattgtctgccatacttggagcctgtgtcatcaggcaggatgcgtctttgatcttcgggaatgccatcacatcacggatactgtcttcttttgccatcagcatgaccattctgtccagaccatatgccagtcctgcgtgaggcggtactccgtatttgaatgcatccagaaggaagccaaactgctcatatgcctgctcttttgtaaatccaagcacctcaaacatcttctcctgtacgtcgttctggaagattcttacacttcctccaccgatctcatttccatttaagacgatatcgtacgcttttgcacggactctgcccggctcggaatcaatatactgcagatcttcttccatcggcatcgtgaatgggtgatgcattgccagataacgattctgctcatcgctccactcaagcagcgggaattctgtaacccacaagaaattgtactgattcttgtccagaagttccatctgtttcgccagttccagacgcagatttccaagaacatcccatacaactttgttcttatctgccgcaaagagcagtaaatctcctgcttctccgttcattgctgcaatcagattgttcatctcttcttctgtcataaatttagagaaggaggacttcaccgtaccatcttcctggattgcaatataagcaagccccttagcaccgaaatcttttgcaaatgccaccagcttgtcaatctttttacgcggcattgccccctgtcctttggcgttgataccacggacagttccgccgttttcaatggcgcctttgaataccacaaactcgctgtctttgacaacgtctgtcacattcactagttccataccgaaacgggtatccggtttgtcagaaccgtagcggtccatcgcttcctgccatgtcattctctggatcggaagctgtacatccacatccagaacttccttgaacagttttgcaaggaaacgctcgttgacttcgatcacgtcatctacatctacaaaggaaagctccatatcgatctgggtaaactccggctgtctgtctgcacgaaggtcctcgtcacggaaacattttgcgatctggatatagcggtcacatccggaacacatcagaagctgtttgtaaagctgtggtgactgtggaagtccgtaaaaacttcccggatgtacacggctaggcaccagataatctcttgccccttccggtgttgtctttccgaggatcggagtctcgatctcaaggaagccttcttctgcgaaaaactgacgtgccagtgttgtgacctgacttctcatacgcaggtttctctgaagatccggtcttcttaaatccagataacgatatttcagacgaagttcttcctttgtcttgctgttttcttccacctggaacggcggtacctcggattctgagaggatgcgaagttcttcagcacgcacttcaatctctcctgttgccaggttttcattgactgcaccgcttctcttctccacatctcctacaaccgcaactacaaactcacttcttaattttgcagctttttccatcagctctgcctgctcttctccctcaaatacaatctgaaggattccggagcggtcacgcagatccataaatacgattccgcctttatttctgttcttctgtacccatcccatgacggttactttctctccaatgtttgcactggacagttccccgcatcggtgtgttcttttgagtccctgcattgattctgccatttctctgtttctcccttcttctctacaactgctccacattgtcagcatagcagtctacaatctctgtatatccctgttccatcagctgttctttctggaactttttatttttcttcatgttgacgatcatcacctgttttccaagtgcgcgctctgcttttgccagatttaggatcttgagcataccttccttcggcatcttcttgtcgatcagaaatgctttcttctgtgcggctgtcggtacctgatatcctcgttctaaaagcagcatgacaatccgttcaaatccgatggaaaatccgactgcaggtgtattctgtccggtgaattttccgatcatttcatcataacgtccgccgccgcctaccgaaccgccgaactcgtccatggaaatctcaaagatcgtccctgtgtaataggacattccgcgaaccagtgtaggatcaaatttcatacggaaatccgcttctttcgcactctctacacatgtgatgatggtctcaagcgaagccgccgcgtcatccgcaagaaagccttccagtttttctttacagtaacgtacgccttccacgtcattcgtaatctctttgaataactgcaaatatttttccacagactcttttgcatatccgttttcctctaattctgctgccacaccatccagaccgatcttgtccatcttgtccaggatgatgaatacattttcataatcactctctgcaaatccgctgtatgctgccattgcttttaaaattcttctgtcattgatacggatcgtaaagtttttaaaatccagttttccaagcagcgtcgtcgttgccaggatcagctcgatctctgccagattacctggctctcccagaatatcgatatcacactgcataaactgacggaatcgtcccctctgcggtctgtccgctctccagacatttcccatctgaagtgctttaaacggagacggcagttcatttgcattgttcgcatagtatctggacagcggtactgtcagatcgtaacgaagtcctccgtccacaacatctttttcttcttttgcttcttcgatcttcagcttttctcctctttttaaaatcttgaagatcagtttttcattgtctccgccctgtttgctgcagagattttcaatgtgctctacacatggagtctcaatggatgagaatccaaatgcgcggtatgtctctttgatctgtccgatcacataatcgcggatctccatctccgccggcatcatatctttcattccggttaccggtttctttttcagcgccataaccattctccttttctctctatcatctcatcaatacggctttcatactccgtaatatttttcacattttctatgcggatcagattcgtctcccgtccattgtccagacggatcttctccggaagcacgatctttgtggaggcacctgcccctgctgcaaggatcgtctgtttttcttccataataagtatattgtatattccggctttgtcaacctttgcatatccaacattttcaaaatttcccgcaatatttttctgccggtacagataatacggcacaagtcccatgcgttctgccgccctggcactctcttctaccatctgttcgatctcagaatgcagatcaatcttgcgctgctcctggccgaacttcgccgcccgcttgatcgccagcgcatgaaccgtcagactgtccggcgaaagctcttcaatctgacaaagcgtatccctcatatcctccgccgtctctcccggaagtcctgcgatcagatccatgttgatattgtcaaatccaagctctctggctgcatggaaaatgtcttttacatcctgaacggtatgctttcttcccaccagatccagcgttttctgctgcatggtctggggattgacagaaatcctggtcaccggaaatcttcgcatcacttccagcttttctcttgtaatgctgtccggtcttcccgcttcgatcgtaaactcctgcagatactcaaatgaaaacgacttctgtatcgtatccaaaagctcaaaaagttgctctgcctccagtgttgtcggagtccctcctccgatatagatcgtattaagctttctttcttctgcccgctctcccagtgcccggatttcctgacagagcgcctttaaataatcatctacccggtctttccactccgccagaggggacgaactgaaagaacagtacgaacagatgcttggacaaaacggaatccctacatagagactgaatccctgctcatagtccagtctgccaagcagctctttttcccgctctgcaatcgcaatgccaagttctgccttctggtgactgactccgtactcctgctctaaaaatgtgcagacttcttttcggctcataccggcttccagtttctgcatagccagctttgtcggtctgacacctgtcagcatcccccaggcaagtatccgtccggtcacttttgacagccagtcatagacaagctttgtcaccttcttctttccatcctggcggtccggacagtctgcaatttctgaaacaggaacataaaagcaagaattctcttccagtttcactgaaaccagagattcctgcttttcgtccagattctggctgatctcctcattcgggaaaaaagccttcacaatatgatataaattatacatatataacgtatctttactgctgatctgtatcatcatatttctcttccgttttcttacaaaaacggattattctccttttcaaatccaatcgttgttgcctccatatgtcccggatacacctgcgtatcttccggaaggctcagcaatcgctcttttaccgaacgcaccagtgtactcatactgcctgtcggaaaatctgttcttccaacagagcctgcaaacagtgtatctccgctgaaaagaacctcctcttcttctatataataacagcatcctcccgccgtatgccccggagtggagatcatacggatctgatatcctgcaagtgcgagagatgccccatcttccagaaacttggcgtccgcaaacacataccccgctccatatgcaacagacagattcacattggcatctgtcagaaccttctgctccagtgcactggcataaacaggaactgaccattctctgcgcagtgtgtcaattcccataatatgatcaaaatgaccatgtgtcaggaggattccctgcaactgaagaccctctgtccggataaattcgacaagcggcgcagatggtgccgccggatccacaacaaaacattctttagtattttcattgtacaccacataacagttggtgccaaccattccgatcacaaattttttgattctcatttttctctaccccgctgtccgttcaatatccagaactccttctacattgcgcagtttttttatgataagattcagctgttctctgccctttacaataaatcccatttccagtgtagcggttccttttttgctggttcgtgtattcatagatctgacatcgatcttttcttctgtaaatacctttgttacatccagaagcagtccctgcctgtcgtttgcatacatcttcagctctgccagatactgacctccaccttccgtctctgcattattctcccactctgcatcgatcagacgctcccgctccgcagcagacagatgcagcatattcacacaatctgtacggtggatcgtcatacctcttcctctggtcacaaatcctacgatttcatcacccggaaccggattgcagcatttggagaaccgcactgccatatcatcgattcctttgactacgattccgcttttcgattttgcaatgtggactttctgattatttgcctcagaaatcttctccaggatcgtcgcgtctgtaatctcttttttgtgatcttttccatactcttctaccagacggttgaccacctgaccttcttttaaaccgccgtgcccgatagccgccagaaccgcatcccagtcacggaatccgtactttctctggacgatctgcagatacttgggcttcatcagatctgcctgggtcagagacttggacttgcaatatgcggcgatcagttcttttccgcggatgatattttcttccttaaactcatgcttaaaccactgattgatcttgttctttgcctgcgtactctttacaatattcagccagtcacggctcggtcctttggaattctgagaagtcagaatctcaatccggtctccgttctggatcttgtaatcaatattgaccagcttgccgttgacacgggctcctaccatcttgttgcccaccgcactgtggatcgcataggcaaaatccaccggagtagaaccatttggcaggttcttcacatctccgtttggagtaaaacaatacacatcttctgcaaacagatccagatcgccttttaagagacttaaaaactcccgattatctgacatgtctctctgccactccagaatctgacgaagccagcttaacttttcttcttcccggctcttattattcttcgccggaccaccgctttctttatatttccagtgagcggcaataccatactccgcagtcttgtgcatctcttccgtacggatctggatctcaaacggctgccctgccggtcccatcagcgtggtatgcagtgactgatacatattggcttttggcatggcgatatagtctttaaaccgccccggaatcggagtgtacatctcatggatcacgcccagagctgcatagcagtccttcacagaatccacgatgatccgtactgcaaacaggtcgtatacctgatccaacgtcttgttctggttcaccatcttcttataaatactgaagaaatgcttcactcttccgtacaccttggcctggatatgggcgttctccatatgatgagaaacttctgccacgatctgctgtacaaactcttcccgctcggtctttcgctcattcaaatctttcaccagctggaaatacacttccggctgataatatttcaaagagagatcatccagctccgtcttaatcttggagattccaagtctctgagcgatcggagcgtaaatatccatcgtctctctggctttttccttctgttttgccggaatcataaactccaacgttctcatattgtgcaggcggtctgccagcttgataatgatcacacggatatcttttgccatggcgagaaacatcttgcgcagattttctgcctgtacttccagcttatctttcgaataagacagctgacccaacttggtgaccccgtctaccagaagtgcgacttcttctccaaattctcttgtgatatcctccactgtcatctcagtatcttccaccgtatcatggagcatccctgccacgatcgtctctttatccatctccaaatcagccagaatgatccccacccagagcggatggatgatatagggctctccggactttcgcacctgctccttgtgagcctctctggaaagctgataagctttctcgatcagagaaatatccgcagacggatgatattttctcacccttgcaatcaatgcgtcatataactgctcagggttttgataatcttcaggtgctttcacggcgtgcccatccaccatctccagatttttgttcagaagttcatattccagcgtacctgccatatcaaatccccctttttcttttccatcgtaaaaattccatatggattagtatatcatcattattgataatttaccactgtaatctgtatggttttattcccccggtattcattgaccgatgggtaaaatgtcagagataccttttcttttgtctgcagatactccatacactcctgtacctctccaaaataaatggcttccattttccgcccggcctgatccaaaacctgaaatttcaggacgttctgattcttcccgatgatccggagattctgcacccgaagattcttttccgcgaataatggctttgtatttccttttccgaaaggctccagcaattccagctcatccacaatttcttctgtgacatatgccagtggaagctgcatatcaatggacaccttcggaagcagatcttccggtgtcagttcacacagctcattgatcgtcttccggaaccgctctacattttcttcttccagagacagccctgccgccagcttatgccctccgaatttggtaaataacgcccggcatttacacatttcttcaaacatatgatagctttcaatggagcgtccggagcctttcactccatgttctccctgggtcaggacgaataccggcttataatacttttctttcagacgtcccgcgatgatcccggcaatactttcatgacagtccggcagatataccaccagcacccggtcgcttttcagctctgttgtttcgatctgctccacagcctgctctacccctttttctgtcatttccttgcggctgtcatttaacgccttgagatcttccgccatcatcacggcttctcttcggctctttgtttccagaagctccagcgcccgctttgccgtatccagccgcccgctcgcattgatacatggtccgatgacaaatccgatgtgataggcagacaatctctctatcggtacctgcgtgcattccatcaatgctttcagaccttcatttcgcgtgcgtttcagcatttcaagtccctgttttacaaaaatccggttctcatccaccagatccatcacatcccccacagaagcaatggccacattttccatcagaaaatctacatcatctgcatcctgtcccatgacattatataatgcttccaccactttatacgcaactgcagcaccgcacagacctttaaacggataaggatctcccggtaaatgcgggttgaccactgcatctgcaccgggaatcagatattctttctctcctcctgcttccagataaggtacttcatggtgatctgtcacaatgatcgtcatcccctgcgctttcccgtaagcaatctctgaagcggctgcgatcccattgtcacaggtaatgatcgtatctacaccgtcctccaatgccctgtcaatgagcatctgattgaggccgtatccatccttcatccgatccggaatatccgtatccaccaaagctcccagactttctaatcctgttttcaaaatatacgtcgcattgactccgtcgatatcataatctccgatcacacggatcttttcgccttcccggattttttcctccagaatctccactgccgtatccatatttttcatcagcatcccatcgtgcagatctgcaatcgttccatttaaatagtagtcaatattctgatcgcctaaaatatccctgtttcggatcaggcgcgcgatgatcggggaaatatgatatttttccgcaatctgcgtaaaatccgctttcttcatggacacaaaccacttttccatgtcagttcctcccaagtatctttcttgtttttctagctgttaatttttattgtagcatactaaaaattttctgtaaatctgcccagaactggagtgcgcaggcacgacgatcgcgcatggataggcggggaatagtgtgaacaataacaagaactgttctgccaacaaatatttcattcaaaaatttccaaaaaacaaacaaatttcctgaatcacaaaacagtgccccataccttccggcacggagcactgctattttatttaggaagaattttttgtttgttatttatctgcgtcttttcaggaatgccagaagcgctgctcctcctgcaagaagtccggatactgctccggcgatcggagttgcatctcccgtcttcactgctttgtttggagttcctgctgacggtttctgtgtggaagactgattattgtttccattgttgttttgtccgccattgtttccatttcccggcttgttgtctggtttgttgtccggtttattgttgtctggattttccggtttctcagtctgtgctttttcctccagtgcatcgatggcagttcttactttctgtactgctgcatcaatgtctgcctgagacgcctctttgtctgcaagaataaactgcgctgcctccacctctttctgaagtgcttttacagtctcttctgtgtacttatctgcctgttccagacgttcctctgcttcttttatgacagctgtaagctgtgatttatctgtagaaacagctgctttctggaagagcgccgtaatattggcatctgcattcacatcacagaatgtatactctgccactgcaccaacagactgtccatttacaagaacatcactgatcacatatccttcttttggctggatcgcaaatgtctggctcatgccgcgttctacctttacagtaccgcatggagtgatgcttccgccctctcctgctgctgccataattgcaaactctttctggatcggcgcaatattcattgctgcatccagtgcattctgtgccgcatccactgtttcctgtgtcactgccggatctgctgctactgctttcgctgcatccagtacttccatcagattctgaacatcttccggaacatagtcctctgcatgtttcagaagttcttctgctgctgcaatggactcgttgagttttgtcttgtcagcctgtactgcttctttttctgcgaagaatacttcaatgcttgcatctgcacgaactgcctcaaatttgtactctgtaacagctccaacggattctccatttacaaatacttcttttacttcaaatccttcatatggttggattgtaaatacctgatcttttccttcttctactttcactgcaccgcttggatcaatggttccaccgccatgtgcaactgctgtgatcgtaaattctttctgtaccggtggtttttcctgcagattttcaattgctgtccgcacagctgttgttgctgcatccgcttctgcctggtttgcctctggattatccagtacgctctgcgcaagatccattgcttctttcaatgcgtttacggattcttctgtgtaagcatctgctcccgcaagtttctgagccgcatctgcaagaactgctttcagggctgtcttatctgcttctggtacagccggtttttctgccagaccttttgttgcttcttctactgcttttgtagctgcatctacactttcctgtgttgcgttttcatctgctgctactttttctgcttctgctactgcatctttcagcgctttcacggactcttctgtatatttgtcctcttctttcaaggcttcttttgctgtctcgagcgctgctttcagtgcatctttgtttacttccggcgctggtttttctgccagaccttttgttgcttcttccactgcttttgtagctgcatctacgctttcctgtgttgcgttttcatctgctgctactttttctgcttctgccactgcatctttcagcgctttcacggactcttctgtatacttatcctcttttttcagcgcttcttttgcagtattgattgctgctttcagtgcatctttgttcacaacaaccggcgttttttcttctactaatgtgatatcaaatttatcaagctgtggcgcattcttctccggtgctgtaaataccagcgttccatcgccggcttcatttactacaaattcaatgtcctgtgtatgtgttgcttttgcgccatctccggcacctacttttacaacctctgtctgcggtgcgatcttattgtccttttctgcccatgtcagtccattgtttgtatcaccactgcggaactgtactgttgctttgtattttcctggtttttctgcatgatatggtaagatgatctgatctccactgttcatggcatttacaaagtatccattgcttgcccagtcagctggagatacctgcaatggccatttttcattttccccagtgttcttcagttcaaaatgctctgcctctgctgtgattgttgttccattgacttctgtcgggaagttgaaacgattttcttctgtataggatgccggtgcaaatttagcaacaattgttgcgttagccttcacatcttttaatgtataggatgtgacagctcctacagactcaccatttacaagaacatctgccaccttgtgtgtcttgtccggtgtgatcttgaattctacattttcaccttctgttacttttgtttctccactcggtgtaattgtaccaccttcgccttcgacagatgcattaactgtaaattcagccagttttacatctttcggtgtgatttcaaacttgtctaactgtggtgcatcttttgtgtgtcctttcaatgtcaacacaccttctcctgccttttctgccaccatatcaaacgtaacagtttttgtaactttagaatcatcatttcctgccactacagaaccagatttgatatttcctgcactatcttcccatgcaagactgtttgttgaagatccacttctataagtcaattccacactgtaggttcccggcttttctaccttataaggaacggtaatcgtatctccctgattcagacaatttataaacttcttattacttgcccattcaccatctgaaaccgaaagtttccattgttcctcagccccacctgtattatgtaattctgcaaactcagcttctaatgtggcattggaattcttcctccatgggaatacaaacggatcttctcctgtatatttttcacgttttaccaattcatcttttgctgtctgcagtgttgctgctgccttatttttttcctccagtgttgctccctgtttctctaagactgcttttgcatttttcagtgccgcttcaaatgcatcccatcctgaacggaaccagtcacttttataagtttcacattccttgacaagattagccaatgcgttttcattgctctccatatctttgatggtaatctttgcttttttattgaagccaaggattgttccttcacttgcctcaactaattcgactgtaaaatctctatcgcctgttttattggtatttctttttgtctctactggagctgttgtttctttctccccatctttcaatgtaatctttggattcagttctgtattaaaatcatcctgaattgcacttcctgggtttggctgtaacttcgctgtaatttctccggtagttccgccaacacgtttaacttttaattctcttttttctgcttcattcatggtataggtattttcttccagttcaatcatacctttacccccattattgatcactgctgctgcttcaattcctatagcttttccagtaacctctaacgtaattgtgtgttcaccgtccttcaaatcttctgtctcaaaccatttttgacctgttgcacgttttttagcagatgtatctactgtaactggctctccattatccaccgtaatttttgcagttccatgacccggatctactgttccaaataaatatgcctttgttcctttaaacttcagagtcaattttgctccaggattcgcccatgtatttgtactattaatatactgaggaccattctcatcattccactttccttcgaatgtaaacccttttccatctgatgcatctttatctgaaatatcgatcacatccattccatctggaattggtgtagaaacctccaaatcatctgttgttttataaacacccacttcgctgataaccggaactttcccttcaggtgtgctaactgtaatcttaatctgttgagcatttaccgctcctgcacgacaaagtctttttgctccaattgtttcgccttcatccaaagttgtccatgccccttctgatcccttgcgatattccactttataatgattgatcctctgtccaagctgaattgcctcttcaattgatacaacatcaaaagttttattttccccaagatcaatcaataaacttccttcatttccatctgtcgtccaatatgtcttatcatcaccgtcaatggtatttcctggtttgaaatcaacatcttttcctcgaacttccgatgcctgcacacttgcaccatcctgtgttgcaagatttaccttaaacgtctcctgaatgttctttccaaactcagttactctgtttaaaatagcttcgtctactgtaccttgattgtttggcggaacgttcaataataaggttgcgttgtttcctacagaattgaaatacatgtcaccaagttcttccattgattttggtgtattcttctgtgttccccaaaaccaaccagatgtaatacgggcatctgcctctggaactgtccactgatttccatcttcaaatccaaccgtataaccaccaatattattgctattaatcttattgttttccttgtctacttttgatttcgaccatgtattttttgcagcaagtccatgctcatttccgatccaccgcactgtcgtatacgcttctgcaccaaacaacatacagtccgcatctcttcctgctgcttttccttcatattgctgaattgtgtcaaaccactttttaaattcatattcctgtgcatttgcaccacttcctttggcaccatccatccacacttctacgaatttcccgccatttccgtatttttcattactcagaatttcttttaactgattgttatagaattcattgtaatcctttttatcattttctggtgttgtcggctgcccattctcatctttgtagccataactcggttcatgaatatcccacggagacagatataatcccatatccatattctgatctgtacatgctttggatatctctgccagaatatctgattctccatttttatctttatagccagactctttcacatcataatctgtatatttactgtcccaaatacagaatccatcatgatgttttgctgttacgatcagctttttaaatccggcatccttcaaagtctttactaaagtttctgcatcaaaatcattttttaatgtaaagatctcgcttggtgctttatttccgtagtgctcaccccattcaatctcattgaacgtatttggtccaaaatggcagaacgctgcaagttcctctttctgatacctaaattggtttgcatccggcactacatcgtccggttttggagcgtccgctgttccgctcagtccttcatctccaacccaatttgttgtttctgctgctcttagtgttaccgttccccccatgaaacctgttgttgtcactacaccggcaagcagcattgacatccactttttgtacaaagctttctttttcaccttttttctcctttctgacataccatatttatatatgggattatactccctcacttaaattttcatcaatttattattttccaatttttggttaaaattttccagttctgggtaaatttttaactattttcaccatgatgagtcaagaccaccggcttagccggtggcttgttctgcccctataaggggctattacctgcttgcgcccggaaggcgcactgaaggtctgccaactgcaccacatccacagccgcccctaaaggggcttactcagcgcttccttactccggcttagcccctaagggggcttgctggtttgctttgatttcctactaccactccaagtggtttatttcttgtttttctttaccggctcacccgtaaacgggtcgatatactctactaatgacatctggtcatattctaaatcttctttcagttgattctgaatatacgctttaatcgcagcggtgttcttgcctgccgtatctacataatatcctcggcaccagaaatgtctgttcccatacttgtactttaaattcgcatgcttttcaaatatcataagcgagcttttccctttcaaatatcccactatttctgacacggaatatttcggtggaatttttatcagcatatggatatgatcactgcaacattctgcctcgataatttctatcccttttcttctgcataatgttcctaatatttgccccacatccgcttttatatctttgtagattacctgacggcgatattttggtgcaaaaacgatatgatacttgcaatcccattttgtatgagctaaactatttacgtccattcttaggacctcctgtgctattttatttgtggttttgcagacccacttttattttagcacaggagttcatacttatatctaaagatctgtcctccccctgcatagcagggggtttatttttactgttacacaataaaagaacccttggattatgtgtctgttttccacataaaccaagggttctctcacttactttttgttattttttctttttcgatgttccagctttcgcagattctgctttcttcacgattttagtcttcatcacataccacagcgcacctgtaatacatacagaagaatatgctccgcagataatacctaccatcaaaggaagtgcaaattctttgatggagcttactcccataacaaacagaactgccaccatgacaaatgttgtcagagaggtataaatacttcttgtcagagttcttgtgatacatctgtttaccagcgtatccagctcttctgtacgtttctttgtcttcatctcctcacggattctgtcaaagattacgattgttgcattgatagaatatccaacgatcgtcagcatacatgcaataaatgtatttcctactgaaattcttgcgatcacatagaaagcaagtacgaccagtacatcatgaatcagtgcaactactgcacttgtcgcaaaccggatatctttaaaccgcagccagatataaagcagcataaagactgtggcaatggcaaccgcaatgattgcatccacacgcatctcggagcttacagtagaactgatgttttcagtcgtaatatctttttcttctactccgaattcatctgccatatatttcgcaaatgcttctcgtttttccagatccagcgtctgtgtcttgaaaatgacctgattactgtttgcaacggtctgtacctggatgtttggatcatctgtcaccttctccagatccggaatcattgtttcatcaatctctttcaacgtatatgctttgtcaaatgttacatttgtagatgtaccacccttaaattccagactgtaattgagggcaccttttcctgttcctgcattcactcccataaacacaaatccaaccagaatcactgcgaccgatactgcaaagaaaatcttacgttttccaaggaaatcaatcggcgcacgctcttctttaatccgtccgtaaagctttgtattacgaattccaactgcatagaacgcatacacgatcatccgggtgatcacaagtgcagtaaacatggatacgacaataccaagtgccagtgtctgtgcaaatcctttgactgtaccgcttcctttcagccagagcactgctgccgcgatcaatgttgtgatatttccatctaaaatcgcagacattgctttatgaaaacctgcattaagcgcagattttacagattttccagccgtcagctcctcttttacacgcgcaaagataattacattcgcatcgaccgccataccgataccaagaatgatacccgcgatacccggcaacgtcagtgtgatatcaaatgcattgagcaacaccaagatcaatccagtgtagattaccagtgcaagactggatgcaagtcccggcagcagatataccatgcacataaatacaaatacaatcgcaagtccgatcgcacctgccatcagactggtactgattgcttcttcaccaagctgcgctccaactacattagaacggatttcttccaattctacactcaggccaccgatacggatcgtagaagccagctgctctgcctcttcatattccatggatccttcaatgattgcctgaccatctgtaatttctgcatttactcttgggacactgatcaattcaccatcataatagattgcgatcgtttcttccgcctcttttgccgctttggttgcttctgcaaatttttctgtaccttcctttgtcatagaaagctgaacaacatttttatttgctcctgttgtggaattctgataagaaccagactttgcactcttgatatctgttccagtcaaaacgacagatccatcttcctttaactcatccatactttttgcaagcacatagtttcctgaggaatccagtccataattcggatttccgtcactgtccttctctttgataaaatacagggatcccggctgaccaagctcgcttaaaatctcgttggcatctgtcacaccaggaatctcaatactgatccggttatccccttcctgataaaccgttgcttctgtactgtactgttctacacgcttctgaagcttgtagattgtatcactcatatcctccttggaaggagtatccccttttacctgataggtaatactgactccgccttccaggtcaagtccgagctttatattctttgctgcccctgtctgtccttttccgaatccgaccaccgttgtaaatccaagaagtgcaatcagcaccacggtcagaatcagactgataatccctttactcttcttcatgatctgccatcctctcctgatccgccagtgccgccttgatcataatcgcacattccacacgcttgcgctccatctcacaacttacctcgtatgtatcattgatcgtatgatggaatttataagaattcgccatacatccaccgctacagtaaaatcttgcaaagcagtttctgcagctgtctttggaatacacactgcatcctctgaattcttccggaatctccggttttgtaatcccttcctctacatttcccagcaggaattcttcctgaccaacgaactgatgacacggatacagatctccccaaggcgtaactgccagatattctgttccggaaccacaccctgacagacgttttgccacgcaaggaccgccttctaaatccagcataaagtggaagaacgtaaaccctctgccttcccgttctctgtccaccatgatttttgccagcttatcatactctgcaaaaatcttcggaagatcttctttttggatcgcatacggatctgtatcttccccgactacaggctcaatcgaaatctgctcaaatcccagatctgcaaaatgcaggacatcctctgagaagtccaaattttctcttgtaaatgttcctcgtatataatacttttcctgatttctgctctctgccagtttctggaatttcggaacgatcagatcataactgccttttccattcctaaacggacgcattctgtcgttgacttcttttcttccatccagactgagcaccacattgtccatctctttattgacaaattcctgcacttcatcattgagcagaactccatttgttgtcaatgtgaaacggaaatgcttgtcgtttgtcttctccagctctcttccataggcaaccagatctttcactacctgccagttcatcaacggctctccgccaaagaaatcaacctcgagatttcttctctttcctgaatttgccacaaggaaatccagcgctttctttccaacttccaaagacatcagcgcacggcgtccatgatactcaccctcttccgcaaagcagtatttgcaggcaagattacaatcatgcgcaatgtgcaggcaaagtgccttaacaactgtctttctttcttttacttctccgatatagctctcataaacatcctgtgtaaacaactgacctgccgctgtcagctctgccactgcctccagaagatctctcaaatcttcttctgcataaatatccccaagcttttcaagcagatattctgccgtcttctcttcttttaacgtttccggcgtatgagcagggttcatggcctccagacagccgatcacatcatacgcaatcttgtccacgacatgcacagatccgctgttcacatccaggacaatatgatatccattattctggtactgatgaatcacaacagttacccctctttcatttaaattttatatttttgcataacacacgtaaggcagcgaccacggccgctgccctcatgtctgatattcagtttcttattttttgtgttcacaaacctgatttcctactgtacaggatgtcttacatgctgactgacaagatgtctgacattctccgcatccaccttttttcactgtatgattcaatgtctgagtatttaatgttttgatatgtttcatttctattcctcctaatgtgtatgcataagcatctagttttcttagaattataacacatcctgatcactttttaaagcatttttttactgttccatctgtctgcccagaaattctgctgccacagctgccattttttcttccacttcactgaattttttgtgttcttctttgtgtaaaaacaccactgttcccatcacgtccccgccactgataatcggacaaataatttcctgagaatattcctcacccccggcgaatatcggaatatagtccgctttccttttttctgtacggatctgctttcgagcctgtattgcatactccagttctttactgatataacggttcagcagctccttgcttccatttcccgatgctgctacaatctgatccatatcagtaagacacacaatacagttcatggtatgtgcaaggctttctgcgtacagtccggcaacagcaccgatttctccgatcggagaatactttcttaaaatcacgctgccttctctctcggtaaaaatttccagcggatctccttcccgaatacgaagtgtccttcgaatttcttttggaatcaccaccctgccaaggtcatcaattcttcgtacaattcctgtcgctttcatcttatcttctccttatatctggtttttatcgataacaatctgctattagtatcgctcattttttagaaattatgagttattttaccagttttataagaatatataagggatgcatttttccgaaaagagtaactacaaaagattttctatcgttctctctgtacgtttttacttcctcacgaaatcataccgccgatcattccacctcctgtgcacagaatacacacgatcaaaagctgaggaaacggctcctgaatactgtggtaaatcccaaatgaaatcaatacaagaagcagaaaatacagcacaccgattccaagcccccagacaaatttcctgacccttgccattttccctgccacgaaaccacctgccagtgtagacaaaatatacacggtcaaaatccctgctgaaacatgtttttcctccagtccacatttgtaaagcagtactgtcaaaatcaaaaggagcacacctgttacaaggtatgcacacaacagggattttaaaatccaaagtccttttttctgcattgaattttcaacatttgctttcttttccatatacgctctcctcccggctcatttacagctaatacactgtatgagtccgaaaagcgttttatgtccatcgttccattggtatcagctttttttctgtatccagcaggcaacacattgttgtctgtcacactcacaatgttcccctatcattgtctcttttcccaactcatgtagcggtgtgtcaatgatatgcatcagctgactaacaatatcattctctaaaaattttatcatttcatcatctgcaatagtttgccagtcttccagaagatatttaaaagacaaaacccctcatttacaatccttttcccgcttgaaaataaaatttgtaaatgaagggttttctatttttattcgctcatctgcttatactgctgtgcgatatttttcacatggtctcccattctttcaaaatctgtcagcatctctgtaaaaatgattccgctctgaggtttacattttccttttttcatacgctgcatctgtttcttaaagtacttatctctcagatcatcgatcttctgctctgccgcactggcttcaaaaagaacctgcgtcatatcgctgccctcttcatttttcacgatatcaagcgctgtcagacactgttttttcatctcttcgatttcttccaatgctacatcagaaaatgacagattccactctttgagatcttttgcatatcccgccagattcatggcatgatccccgatacgctccaagttgccgatcacggcataatatccattaatgatcttggaatcctctgtcgatttctcattggagatcagagatacgatatactctgaaatctcacggtttaaataatcgatataggtctctctttctgaaatccgttccatttctttttcatcatacttgatcaatacgtcataagctttcccgatatttttagaaaccatcatacgcattctctcgatctcatccctgacctgtgaaagtgcaactgcactggatccgattgcatagttcgattcaaaccgtgtaatgtatttgagtctgtaatcttcgtcatcctctttcttgctgtccggaaggatccttgttgccagctgtgccataacatttccgaatggaagcaggatcaatgttgttacaatattaaatgttgtatgcacattggcaatctgtgcaaccggatttcccggggtgagtgcttccatccaggaaacaaacggggttaccatacagataatcgtaaacaggatcgatccgaaaatattaaacatcaaatgaatcgctgtcgtacgcttcgcattcactttcattccgatggaagccaggactgctgtgatacaagtaccgatgttctgtccaaacaaaatgtatactgcgctggaaagcggcaccattccagttgctgcaagcgcctgcaggattccgacagatgcagatgatgactgaatgatcgccgtaaaaatcgcaccgatcagaatacctaccagcggattctcaactgttgtcataaagttgataaatgtctgtgaatcctgaagcgggaccatggcatctcccatcattgccattcccatgaataaaattccaagtccggaaaaaatcccgctgatatgatgtaccttttcatttttaatgaacatcatcgcagctacaccgccgattgcaaaaatcggagcgattgccgagatatccagtgcgatcaactgacctgtgatcgttgtaccgatattggcacccatgattacccagactgcctgacttaatgtcatcagaccggaatttacaaatccaactagcataactgtggttgcggaagaagactgaatcacggctgtgatcacagctccaaccagaactcctttaatacggttggaagtcagcttctccaaaatcgacttcattctgtttccggcagcagcttccaggccgttgctcatcatatgcattccgtacagaaacagtgcaagtcccccaagcaaggaaagtatatccgtcatccccattgtattttctccttttcctcttctctttttgtatttttatttttttgctcgaaacgagactgctgtgaatgatatcacagcagtctcgttttccggcaaatcttacaattttgattctagcacaccacatttttccaggtcaacattcttttacactttcttaacaagttcttagtataaccttaacacaggtctttaaagtgcagtctttccctcaagtattgaaaagcctccctgattctgttaaaattaaagaagatttccgaaacaacggaattttaagaaattttaaggagtgtgaatacgatgagtaagatcgatgaagtaagaagcgccatgatggctgctatgaaagcaaaagataaagaaagaaaggatgcactttccgcactgctcactgcattgaagaacaaagcgatcgacaaacgtgcagacctgacagaagaagaggaaacacaagtaattttaaaagagatcaaacagctcaaagaaaccattgagatgacacccgcagaccgcacggatattctcgcagaatgcaacagccgtctcgcagtcctagaagaatacgctccaaagatgatggatgaagaggaaatcaaagcagtggtttcagaagtactttccgctcttggtctggatgcgccgaccgcaaaagaaaaaggaaagatcatgaaagaactgatgccgaaagtcaaaggaaaagccgacggaaaattagtcagtgaagtcgttgcttctttcctgtcctgattcactatgaaagtactgattttatcctgcaataccggagagggacacaattatgccggcagggcactcaaagagtgtatcgaatcgcatcatgataccgcagatatgctggatatcatgatgcttgccggtcccagagtatcaaaactggtggggaacagctatgtcaacattgtccggcatgctccccacctttttcagtgtttatacaaactgggcggacttgtcagttcccccagacatcactctccggtttattatgccaatgctcttctcgccaaaaagctaaaacgttatctggatacacaccattacgatgtcatcgtaacgcctcatctttttcctgcacagacactgacttatatgaaggaaaagaacctgttgtcccagaaagtcgtggctgtagaaacagattatacctgtattccattttgggaagagacagactgcgattactacatcatccctcactatgaactgatcgacgaatttgcagcaaaaagaattcccggagaacgtctgaagccatatgggattccggttcgtccggcattttctgataaatctgacagacaaaaagcccgcgtacgctgccggattccaaaacatgcccaggtttatctgatcatgagcggcagtatgggatttgggaagattcagctctttgttgctgaactgctccgtacccggatacccggagaatatgttgttgtaatctgcggaaacaaccgtcacctgcaaaaaatcctccttgcggaatttggcaaacaggaaggcgttcagattctgggatacactgaaaaaatcgcagattttatggctgccgccgatgtgcttttcaccaaacccggcggtctgactaccaccgaagccgccgtcaaagggattccgatcgtacacacgcgtccgattcccggctgtgagacaaaaaacctggctttttatacagaacggggattgtccctgacctccaaaaaactgcacggacagatccttgccggccgaaaactgatgtcaaacgatgaactgcggcattctatgtgtacagcgcagcacactgtcatcccatcaaatgctgccgagaagacttaccggcttctctgccagctttcttctgcgtatgccgtttcagatgatactgtgaaaaaggagactttatgaatgagttattctttattttagtcggatatctttcgggaagtattttatatgcctatctgcttcccaaatatatttgccatatcgatatcatgaaagacagtcacgatcacaatcccggtacattcaatgcttttgcactggcaggtacacaggttggtattcttgtgatcgcattggagcttttgaaaggatttcttccggtctggctgggttcacatattctggatacaagaagatggatgtttgcatttgttctctgtgcacctgttgcagggcatgcgtttcctctgttttatccgaaacgtggcggaaaagccatcgcagtctcttttggggtattattgggactgctgccgcgatatcgcccggtgctgcttctcatcttcttttatctgttattttcttttttgatcgttgtaaagccgcatctttacagaagcattcttacgtttacactgttttctctgaccggattgttttatttccatgatgcggtgatcagcatgggcacatttttcatttcctgcgtggtcatcatccgacatcttgtacatcatcagaaagagcctttcagcattcgctttttacagcggagctgaaaggctctcttttattttttgatcatagaaatcgcttttgatcgttccagtgtttttgcaagcacataaaagattacggaatcaatcggaacggaaactacctgttttataaatctcgccggaagaattgccagaaatccttttccatacaggatcgtcagccaccaggtaccgagcagaagatttacaagtaaagcaaccgtaattttggctgccacgactcttcccaattgaatcggacgatgatagaaaaaaattccgtaaataacaggtcccagcatcgcattcagtgtatacccaaagaaatacggtcccgtcggcttgatcagaaacttcaggatatccccgattcctcccatgatcccgccaaccaccggaccgaacagcatcgatgccagctcattaggaataccggaaaaaccaatccggataaactccgtaagctgaacagagaaaaagcctaatatcacaccgatcgcgatcaacatggcagtcactgccataacttttgttttcttcaactcatgccaggagtcttcaaactgctgttttaattgtttcataaaaaaatacctcctttgcagtagtcctcaagctacgcacagaaggtatccttatatcaaactggtatatctgtctatgtgcagcagcgggatgcgaaatatgtaccgcaagcattcacttttcgtcctgctggcaactccccgtccaaccggcacttaacgcacatacttctactctgcttttgtttttattttcgtcgtgattatagcacaatttccaaagacggacaactattttttctcctgcggttcttccggtctcacgatcggaatctgaagattgactccgtacggattgatcacaaccccttttgcctcgtttaccaacatcttcggaacattttttgcttcaatagccatcgtcttaaactgatcctctttattgaattttcgaaactccaggatatctgtgaaaatcggctgatatgcatctccgttcttctgtttgagcatcggcattccgttttctttatgaacagctacaataaatctgcctcttccataattgaccagtatctcttcctgcagacctttcagctcttctgtcagttccggcttttcctgtctgcgcatctcctgcataaaatacagagatgtcaggtgaagctgcggattctctacccatacttttccatccggaaggtcctcagtatttggtcgtatcaccagttctcccaactgaagtcttgcttcactttccatatttttattgatcacaagcccgttgacgcccatcggatacaggcttgagaaaaatccaagcagctgtttcttttcaatctttgcgatctggatcggaatccgctgttcaatcagcttctttccctctctctgtgcatcctcctctgtataatataacagcacttcatcatcaaatgtctcttcatcacacaggacatacggcatctttgtacacagagacataaagacatacatctcctctgcatttcgcagactgctcaaaagctgctctttttccggtgactgtccatttttattttcctctttcatgaaactgattcctttcttctgttgatattccctattttttaattataccaaaattttactctgataccaacagaattctggattattttccacttttcgaattctggatctcaaagacaatccgtgtcagatactcctcttcttcagacatggtaaggctgtcaaacagaatgtcttcatagcaatgtgcgcccaactggattttattctctttcccatattctaaaattttcttataggtatcccccaacgtctgccattttcctttatgataggcgatcagatacattcccgccggtctgatactgtagttaactttttgcggtttctcatccaaaagctcataaaaaacagaatactgatcaaaaataccattttgaatctccttggtattttgtcggtatccaatggaatatgcacttttgatcccattcctcgcacaatactcaaacaattctccgattttttctgcccatacccgttcatttgtatccgttgtacaggactggatcatgtatctgtccggttcttcctcgattctgattgcttccgtatctgtctgcattgtcttctcaataatctcactcttctttacaatccactcttccatctttttcagctgctgcatctgtttcctgattatgctctgttctttttgaaacaacttcagcagtctctttggacttctctgattcatatatcctttgatctcctctaaagacacatccagttctctcaatgtctggatcacatcgaacacatccagctgatcaaaggaataaaagcgatagccattctccagcttgatctccggagaaaacaatccaatcttatcgtaatagaacagcgtatgctttgtcactccaaccagctttgcaaattctccggttttaatatatctttcctgattcattggtattcccctcttgactatagacttactctatagtttatgataacagggattgtaaaaaaaaacaactgacaggagcttttactatgacaaattcttatcactatctcaaataaacatacgaaaaataccgccgcatctcctgcatttccaggttgatgtggcggtatttttccttttacgctaaaagatcatctttgtcaatccgattcaataaaagtgaacacagaactccaagtcccagacagatcacatttacgattgccgcacttaaagatactgtaaaacttccaaatggtatgatcataaccgttgccgctactacaattccgacaatggcatggaatacataggaataaaatttttccagaagagcatcaatcatcttcgcgaaacatattaccgtaacaactgcaccgattccacttgggatcataatgctcagattcagatgtcccagcccgtcaacaaacggagtatacaatcccagaggcatcagaagggtagaaaagctcattcccggaacaatcacgctcaatgccagacacacgccgcaaaaaacgtaccatcctacattcggcacaaggctgactgacagcaggttcaatgttgtcagtatggcaaagatcaccactgctgctgccaccatagagatccatgatccgttggtccgtccttcttttcccgcctcacgcatcagagacggcagcatacctgcgatcaatcccacaaaaagacacacggatggatccggatacttttccaggaaaaacgacagtatattcgcaactccaagaaaaccaactgcgccgcccaaaataaccggaagtaatttacggatatgggtaaaaaagtactttcgcggattggccaataactccattacaggtctgtaaattccgaaaatgacgcacaggacaccgcctgaaattcccggaaggacagctccaaggcctatgagcatcccctgaagcattcgaactagaaatgtgcacaaaggcaaacttccctctttgtgttctttcatcataatatctttctcctgtctcaatctcttttttagctgtttttcattgcaacgcttcctacgatatctgccacatgctcacatgcatctgcacatttttcaagataagtataaatctctctccatgcaatgatatttctcacatcctgttcttccacgtgaagttttctcatactggaaataaacagttcatcttctttttcttctaatgtattcatccggataatacttggcttgagttctttggaatgtttgaaattcttaaactctttcaaaagagtctgaagttcttcacagcattcgatcactacatccagcataagaaatacttcctgacgcatttcctgtacattgttgatataaacacggatcagaacttcttctattttatccgtcacatcatcaatatgatggctgagagcaatgatatcctctctttcaattggagtgataaatgcttttgccagcttatctgtaatctcgtgtctctgtgtatctgcctgacgctcgatctcatgaatctcttccatcttctttgaaatctcttccggctgaaactctgtcagtatctcctttaataaatatgctgctttacatgagtattctgcacatttcataaagttatcgaaataataatcatcctgtttttttgacattggtattcctcctgttatccaaatatgtacataaatatttttgccatacaaaaactaatcagtccgcagcccggaaacgtaaaaatccaggtcagcatcatatcttttacaactccaaaattgatcgcagaaaccctttttactgcgccgactcccatgatcgcacttgtctttgtgtgtgtcgtagaaaccggaactcccatcagactggagtacagaagacagattgctccggcaagatccgcggaaaatccctggtaacgctccagctttaccatgttcatgcccactgatttaataattttttctcctccgatactggttccaacagccataacaatactgcacagaagcatcagccacaccggaatttccatcccgcttacggaattgtgtcctcctgcaaatgcgattcccaaaaacaaaacgcctatgaatttctgaccgtcctgtgctccatgcataaaactcatggctgccgcacctgcaatctgcgcacctccaaaaaagcgattcgtcttgcggcggtccatggaacggcaaaagacggtaatcagtttacataccacccatcctgttgcaaatccaaggatcaggctcagtacaagaccatacagaactttgacccattcatcaaagttgattccgcccacgccctgctgaattgcgatcgcggctccggaaagccctgcaatcagactgtgactttcgctggtcggaattccgaaaaatgaggctgctgtactgtatatcacaatggacaacaacgctgcacacaatgcgatcagcgcctcatcggtatggttaccaaaatccaccatattgctgatcgtagatgcaacggagctgttgatctgcgtcatcacaaaaacgccaagaaaattaaacactgcactcatcatgatcgcggcacgcaccggcatacacctggtcgccacacaggtggcgattgcattcggtgcatcggtccagccatttacaaagattacccccagagtgagtaggactgtgataaacagcatcgggttacttataatatcctgccagaaatttacaaatgtcaattccatactctcttcctccggcccttaaacttcattcacgaacacatcaatgttatctacttttccgatcaccacaatgatgtctccctgacgcagacgatattccggcatcacttcaatattcgtctcatctccgttttcaattgcaataatattcaaccggtatttctgacggatctccgtctcttctatgctcttcccgatcaaatggttcgggacctctatctgacggatctctacctggttacataaagaaacatactccaggaagttattggacaacagtttcttcccaagtctcagagccatatccctctccggatatacaacctctgctccgagcttgctcagcaccgctccctgttccggactcagcgcttttgcaatcacacgcggcactcccatctctatcacactcatggtggtcaatacactgacgtccactttttctccgatacaaataatcacaacatcacaattctgtattccaatttcttttaatgtatcagagctgagattgtctgccacaaatgcacagtctgtatactgccgcatctcttttacctttttttcatccttatcaactgcgatgacctcatgccctgactgtgccagcatcattgccagcgcttctccaaaacgccccagcccgatgactccatatgctgtttctactttctttttcatttttttgaattctccctttttattatcctattgaaacttcttcttctgaataccttgctcttggttctgtacggttcacccacatggaaattaaagtaaatgctccgactcttcctgtaaacatgacaagaatgatcaccgcctttcctgccacactgagcgccggtgtgataccggtagaaagacctaccgttccaaacgcagaaactacttcaaacaacagctgcataaaactatattccggttcgagtacacacataaagaacgttgcaacacataccactgttcccgaaagtatcgtaatcataaatgcctttgaaatattctgctctgatatatttctatggaatgcatgcactgttcctttcgtacatgttcctcttattttctggaacatgataaaaaatgtactcgtcttgatacctccaccggtagatcccggagaggcaccaataaacatcaggatacacagtacaaacaggccggcatccgtaaactgcccaatcggataggtggaaaatccggcggttctcgccgaaacgctctggaagaacgcccccagccatgttacattctctgtcagtttaagtgtcagtgttccgacaacaagcaaaaccaaactggtaacgatcaccaccttggagtgcagagtaagcttcttgaaacacttttgttttcctatatccagaataacaagaaatcccaatccgccaaaaatgatcagtgtacatgtggtcagattcaaaaggacatcatcatgataaggcatcaggtttctaagtcctcccaaaatgtcaaaccccgagttattaaaggctgcaatagaatggaaaatactgattccgatcgcatgcacggtactgtaatcccggctgaaaaccagaaagcttaagagcgcacctcccgcttcaaagcacaaggtcattaataatacagattttactaattttacaattcccttatagctttcaatattcagcgcctcttttaccatcattctgcttttaattccaactcgttttcttgccacaagcatcaggcccacgcccagagaagtcactcccagtccgccgacctgtatcaaagctgcaacaacgccctgaccaaaggcagtaaaatgatccgccgtatcaatcgcgatcagccctgtcacgcacactgcacttgtagaggtaaacagtgcatcgatcagagtgacctctgcaccatcctttaccgatatgggaagaagcagcacaagcatccctaacagaatcactgccgcaaatcctgccacgatcattctgccgggcggctgatttctcaaaaacatatttattttcttcattttcttttttgccctgtctttcttttctgaattttttctctatgctcttcccaccatacccacagaggaccggcaatgcaaatggacgagtagcatcctgaaatgaggccgactaaaagaggcagtgagaagtttgtgatagattccattctgtaaactactgagacaacaaaaatgataaatgcacataacacaaccgtaaacgctgtattgatcgaacgctgcaaagtttctgtcgtactgatgtccaccagttctgccagtgtacttttctttttcatgttgcttctgtgctcacggatcctgtcatacagaacaatcgtgtcgttgatcgaatatccgatgatcgtcagcgtcaccgctacaaacgcatcattgacaggaattctgaagattccgaaaataaagagcacgatcagaatatcatgaacaagcgcgatcacagctgtgactccggatgcaagacctcctaatgccgaaaagcgaagccggatatataccacaatgaagaggaatgagagaacaatcgcaattaccgaattcttcaacgcctttgctccgatatatggttctaccgctgatgtttccgaggtctcaaactgattcttatttccctgattgatggtatttagaatctctttctgctgttcgggcgtcaacccttttttgcctgaaagtgtaatgaccagactcttttctcctgtggcagagttttcagaagtctgtacactgacactgcgatccacaatatcttctacctctttttgaatctgtcctgtatccgcctttccggtatatgtatatcttaagattactccacccgtaaactgcgtatccagtttcattccatttacgcaactccatatcgttcctgtaaggagcagtgcaacacttgtcaggaagaaatatttttttgcctctgcaaatttcaaaatcttcttatcttttttctttctaaaccacttttcctgattgaacagcttatatcggatcactgaattcagcatatatctggacatccagactcctgcaagcagattgatgataacacctgtcaacagggtatatccaaaacttagcattgtacctgatccgaagatcatcaaaatccccgctactgccgcagtggtgacatttccatctaaaacagatgagaatgcacgcttatatccattcttaactgcatttctgacggaatttccttttttcaattcttcactgattcgctcactgataataatattcgcatctaccgccataccggctgataagatcaaacctgcaattcccggcagcgtgatcgtgtactgcggaactgaaataacaagaatctgaagtgcgatctgaaacgtcagtgtcagacagctgatcactcccggcagccggtaccatatgatcataaataaacagatcagcaccattgcgatttccgctgccagtgccattgcatttaacgcttttccgccaagtgtcgggctgatcgtactgtagttagtcgtcttcatggaaaacggaagagagcctgaattaatcttatcagaaaggctctgtgcctcttctttggaagacattccggtaatctctgcttttcctcctgttatcttggcattgactgtaggattggagatcaggtcatcatccatataaattcccatttgctgtcctacaagcttctctgttgcatccgcaaatttcttcgcaccttcgctgctaaattccagttctacgacatagtttttctgctggtctactgcaacctgacttctggaaacatccgaacctttgatgtaaactgtattatccggtccgcgaaatgtcagctcggccatctcacccagttcctggatcgctgtttccggatcaaaattcttttcatcagatttccatgggaatctgacaatcacatctcctgctttctcatccaccgttacttcacgatctaatatattctgtgaatccagacgagtttcgatgacctctcttgctatctccaactgttctgctgtcggctttttcttcaaacctgacggttcaaaaaccgcctctacgcctccgcggatatcaatcccaaaacgcatgtcgcgaattcctttaatatcctctccgcatccaaaaactgcaatgcacacaaaaaagacgattactgcaagagcaatccatatatgtaattttttatttttcatttttcccgctttctttcaatatttcatatttttagattccgaaagcaagatctcgtttttttccatccttctccaataggatatcgtattcacacagaaatcgcgtgaaaggaagtgtatagaattgaatgcacgaaaaaaagactctctttaagcataccacaaaagagaatatcagaaataaaagcagttccatcggcaatctctgcgtgctcttacgctgttccgcactctgcgcagaaattgcttctcttggattctccaaacgcagataattatcatgaagaactttcttttctatgccatcggtatactgtgccgtcatctgtatacttgagctttgttctttcacaaatctatctgcattttcaaactgaaaatcagaaggaagcaagatgccgacaaccatgatcaaaacagctgctaaaacagatcttactctatgattcatttttcttcctcctgtttcttaaaagtatattgagagtaacactaaattcttcatatgtcaatatatgatttgcttttcagattttactctgtcaaaggctctgccgactttaatctgttatcgtgattttctcgatgaccggttgattttcagccttgactgttccattatcatcttctacaggaacatccttgcaaatctgatccacgatctccatgccgcttgtcacatgcccaaacgctgcataattcccatccaaatagtcactgtcctcctgaacaataaaaaactgtgaacttgcactgtccggatcctgcgccctggccatagaaatggttcctcttgtatgagaaatctcattttctactccattgctggaaaattcccctttgatcgtcttgtctacaccaccggttccatctccatttggatctcctccctggatcataaaaccgtccatgatccggtgaaaagtcagattgtcataaaacccttcttttgcaagattgacaaaattggtcactgtaatcggtgctgtatctgcatctaattccaccgcaatcgtaccgtaatccttcacctgaatttccacatgatgcgttccgcttaacaaatcctccgaagctttttcctgcttctgttccggctcttttgtcggttcttcttgtttctgacagcctgtcacagctaaaaacaccaacataaacgcagccacaattcctaattttcttttcatttttccatattcctttcagacaaaagaggttctgcccggtatatcatataccgaacagaacccccttttatattacatattgattttcaaacgtatcgcaccaattatgcgtttttcgcagatattgcggcttgcgcagcagcaaggcgagcgatcggcacacggaatggtgagcaggatacataatcaagaccaagtttgttgcagaattcaacagagcttggatctccaccgtgctctccacagattcctacgtgcaggtttggatttaccggttttcctaatgcgattgccatatccatgagtttaccaacacctgtctgatccagttttgcaaatggatcgttttcaaagatcttagcatcatagtaagcatccaggaattttcctgcatcatcacgagagaatccgaatgtcatctgtgtcaggtcgtttgtaccgaagcagaagaagtcagcttctttcgcgatctcatcagctgtaagagcagctcttgggatctcgatcattgtaccaacttcgtatttcaggtcacttcctgcagcagcgatctcagcgtcagctgtctcaactacgaatttcttcacgtatttaagctctttgatctctccaaccaatggaatcataatctctggttttactgtccagtccggatgcgctttctgtacattgatagctgcacggattacagcttttgtctgcatcttagcaatctccggatatgtaactgccagacggcatccacggtgtcccatcattgggttgaactcatgaagtccatcgatgattgctttgatctgctcaacagttttgccctgagcgtcagccagtttcttgatatcctcttcctctgtaggaacgaactcatgaagcggtggatcaaggaaacggatagtaaccggatttccttccagtgcctcatacagtgcttcgaagtctccctgctgttccggaaggatcttctcaagtgctgcttctctttcttctacagtctcagaacagatcatctcacggaatgcatcaattctgtttccttcgaagaacatatgctctgtacggcaaagtccgataccttctgctcccagttcgcgagctttcttagcatctgcaggtgtatctgcatttgtacgaactttcattgttctgtatttgtcagcccatcccatgattcttccgaattctccagcgattgtagcatcaactgtagggatgattccgtcatagatatttcctgtagatccgtccagagaaattgcatctccttcgtggtattcttttccgtttaatgtgaatttcttgtttgcttcgtccatcacgatgtctccacatccagatacacagcatgtacccattccacgtgcaacaacggcagcgtgagatgtcataccaccacgtactgtcaggataccctgagcagatttcatacctgtgatgtcttccggagatgtctccaaacgaacaagaattactttttctcctcttgcagcccactctacagcgtcatctgctgtaaatacaactttaccgcaagcagctcctggagatgctccgagtgcttttgccattggtgttgcagcttttaatgcagcagcatcaaactgtgggtgaagcagagtgtcaaggtttcttggatcgatcatagcaacagcttcttcttctgttctcattccctcatcaacaaggtcacaagcgatctttaaagcagcctgtgctgttctcttaccattacgtgtctgaagcatatacagtttaccatgttctacagtaaactccatatcctgcatatctctgtagtgtttctccagagtattgcatacttctttaaactgagcaaatgcttccgggaatttctgttccatttcggaaatgtgcattggagtacgaactccggcaacaacgtcttctccctgtgcgtttgtcaggaactctccaaagagtccgttctctcctgtagcagggtctcttgtaaatgcaacacctgttccacagtcatctcccatgttaccgaatgccatcatctgtacgttaacagcagttccccatgaatatgggatatcgttgtcacgacggtatacattcgctcttgggttgtcccatgaacggaatacagcttttacagctcccatcaactgctcttttgcgtctgaagggaaatctgtaccgattttttctttatattcagctttgaactgtcctgctaaagtctttaagtcttctgctgtcagttcaacgtcaaggcttacacctttttcttctttcatcttgtcgatgagctcttcgaagtattttttacctacttccataactacgtcagaatacatctgaatgaatcttctgtagcagtcccaagcccagcgtgcatttccggatgcctctgccagagtctcaacaacttcttcgtttaatccaaggttgaggattgtatccatcataccaggcatagaagctcttgctccggaacgtacggaaacgagcagcggattttctttatctccgaatttctttcctgtgatttcttccagttttacgattgcatccatgatctgcgccataatctcatcattgatctttctgccatcttcgtaatactgtgtacaagcttctgttgtaactgtgaatccctgtggtaccgggagtcccagacttgtcatttctgcaaggtttgcgccttttccaccgagaaggtttctcattgttgcattaccctcggtgaacatatacacccattttgttgccatttttaaacgacctcctaatataatttttttcaaataaatttgcactaagtcgcatataatattttaatggttttgccgaaatacgtcaagccttttgcacataattatgtacaatttttacatctattttttggttattttaatcattcccccttttatttttcagcatttaacaaatatattgtcgtgaatctcgcaaaaaaactatgcattttgcacaattccaacaaatcccatcacataaaaagaagatacccctcacgaagtatcttctcaccctgtcttttatttcatatcttttaagaatgcgcagtatccacgatatgcttcatatacatccgccttgcttgaaagttcccatggagaatgcatgctcagcactgcaacaccgccatcgatcacttccattccgaagtttgcaagaatgtatgcgattgttccgccgccgccggcatcgatcttgcccatctctgtcagctggaatgcaacctgattttcatcaaatacatgtctcagtcttgcaatgtactctgcattggcatcattagatccaccttttcctctggatcccgtatgcttattgagcaccataccttttccaaagaacggattagatctcttgtcataaacatccgcatgcatcggatcaaatgcagctcccacatccgatgagatcatggtagaatttgccattgcacggcgaagttttaattcagaaaactctccgcacttgtccaaaatctctgcaacagcattttcaaagaaacgagactgcattccagttgctccaacacttccgatttcttctttatctacaaggatacagcaggatgttctctttttgttttctgtatggaacattgccatcaaagaagtaaaggcacaaactctgtcatcctgtccatatgccattaccatgcttctatccagaccgcagtcgcgtgctttgcctgctggaacgatttccaactctgctgacatcagatcctctttctcgatatcatatgtctcttttaacagcttcagtatatgtgctacaaccgcatctttttcctcaccacaaagtggtgcgcttcctaccagaatatccagagcttccccttcgatgacggatgccgctgtcttttccatctgtttggatccaagatgtggcagaaggtctgtgatcgcaaatattggatcttcttctttttcgccaatcactacgttgaattttgttccatcttttttcactactacaccgtgaatagccaatggaagtgtcacccactgatattttttgattccgccatagtagtgtgtatcaaaatatgcaaatccactttcctcatacaacggattctgtttgagatccaaacgcggagaatccacatgcgctcctaaaatattcattccgttttccagtggatcctcaccgatctggaacaatacgatagattttcccatccagtccaggtatactttatctcctgcctgcaatgtatctttctgattcaagtctacatagccctctttttctgcaaggcggatcacttctgtcacgcattctctctccgtttttcctgcgtcaagaaaatctttgtaatctgctgtcagagtttcaagctctgcaagctgtgtgtcgttatatatctcccataatgttttttccatagctgtttttctgtcctttctgttgtcttttctccatattatactatctcttccatccaaatacaagagagcgcctcttttgttttcgttttcctgtttttctaaaaaggattgttcttgttttttttcgcacagtttgctatattttactatattgtctgcatctccgggaaggaaaaacggactgccgcaaatcatcgctgacactatcatcttgcacgtcgaaaggagaatttatgagtttacacgcttccaaaaaaagtcccgaagaggttctagaaaagaggattttgcttctttcttttctctccggcatctgcttcgtgatcgtagaattattttatgccatatacagtcattcgcagtctaccttaatggacgctttatatgatgcttctgaacttgtttttatcgtcctgcttctttttttaccccactgtttcatatgccggtttccgaaaagcatccctacggattttttcagttggaatctgtttttattctgattaaaaacattatgctgatttctgttactgcaagtgttcttaccggagttattgaaaaattattttccggaggcagtaatattgataaaggacaggtttccctttttcagatgatccttggtttcgcaagtcttcttattttattaatcatgaagctgatgagtaaaaatatttcatcacctaccgtaaaagctgagattcttggttggaaactggatgtttgctacagtcttggaatgtcttttgcattttttattgcgatgcagttaaagcatacccctttggcgttcttgtctccatactttgatcagctgattgccatcgtgatcatgttgtttatgattcctgaaagcatcaaaatgcttctggaaacctttcgtgaactgcttcttttttcaccggatcaagaaaccgtggatcagatcaaacaaatttccgagggtattctaaaagactatgcattcactcctgtcttctacgatatctcacgtactggaagaaaaatgtgggttgccatctattttcatgtttctgcagaaactctgtctgtacaaaatgtccgtgaggcaaaccacaagctaaatacggcattgatgcagagctttccggatgtatgctgtgagctcgttttggatactgccgatttctgatttcaaaatcaaagcaacggaatttctcccgttgctttgccgaaacatattcttattctttacagatttttttgttctgtagagcatggattccattcaagaccgcaagaacgatgtatcatacataatcaaaatcatccggtccctcaaaccaggatttccgtccctgatgaaggatgatagccagtaccgccacgatcagatatccaattgcaaacggtgaagcaggattgaacccgagtcctgcactgtgaataaatccaaaacacgcaagcacatagcctactactgccgtgattgccactttatgaagctgcttgtcaataatgaacactgtcattgttcctaacagaattccaatgatgatcgctcctgatttcaccgcaggtactccgttccacataacccccacatccttgatcatctgcgttacttctgcattgtattctgccagtcctgacggcattacctctgtcatataccctgccagtcccacacttcctgtgatctgtgtatacagataatcagcaaccggcggaaccatcgcgattccaactgccgcataatgctttttgtcacagtctttaaaagcctgtgcaaccatgacgatcgcacaccataaaaatgtcactgcacatactgccggcggaaccatgttgcttaagaacgtaaacagaccgaagattcctgccgctcccagtaccagacctgacaccagtgcatatccaacacctgctttggcttttttcaggcctgcatgtccaagccatactgtatttggcacgacacctccgcaaattgcggaaagcatcgtacagattccgtccgcaaactgtgtttctctgacactgtaattatctcccgctgcatttgccgcctctacattgtccatggtctcgataaaattgtagatttccaccggaatcacgatcgtcagataaggagcaacaactgccacaccattgatcagatgctggattccgttaacaggattcggaatatagaaaccgattccgctgaaatctacggttgttcttcccaggcagaatgcataaatgatcccacctacaatcgcaacgacaagcggaggaatctgctttggaaataaatagcctccaaaaataccgaccattgccacaaacaaaatcggaagtccgatcagcggatcgccgaatacatcaaacacaccctgtgttgccatccagataaatccgattcccgccacagttccaaggagcgctgctctcggcagttttttcttcatccatggtccgataaatccacccaaaaactcgactgctccgccgataaagcaggctaccacagcagctgaccatgcaagttctgcatcattcaatgcataatgaagcggcatgatcacgccgtatagcatcacaaacattgccggtgtggaaactccggaaggaagtgccgtaacatccgcacgaccttcttttttggataatcttcttcccatataagcatagtaaactccactacagagcagtccgatagacattcccgggatcacatacccgtatacaattttgtccggccactccagtactcccgaaagtgttgcaatcacgatcaggtaatttacaatattattggtgatggaatatgtcattccaccaatgtcaccgcgctgaaaccacggcactaatgtcttttgttttcccattttcccattcctttatcttctttgtttctctatctggagatttctaccggaataaatgaaaacgttgtgacatcgaacaagcccatatctgtcagtttgatctccggaatcactgccagggacataaaacataatgtcatcaccggttccacatctccacagatgccaagctctgtatatgctttttcatgaatacttgtaagcttttcatctacccactcgccgctttgatcgctcatcagtcctgcgatcggcatcggcatctgttcgatcacctttccttcttttacaagaacaataccgccttcctgctcgatcagactgtttactgcaaactccatctcttcgtcactgactccgaccacgataatattatgagaatcatgtgcgacagacagtgccacagcaccctcttttattccatatccttttaagaatccgcaagctacattgccggttccctggtggcgttctacaacggctactttcaccagatcttcttctggatttcttacaaattcgccgttttcatccaactgaatgcgggcagtcgtctttttcgtcacaactcctcctggaaggatctcgatcacgttgacctgatcactggtcagatgcattttaaacttttctgctgaaaaatcttttacgatcacgcttcccttcacagaagagatatcatatggcgtgatttccggtaaatagcttccttggtcagcagtcagttcccctgcgatccatactttctccacctggaagtctttgagatcatccagaagaacaatatctgcgcgatatcccggcgcgatcgcacctctgtcatgaagccggaaacactctgccgcattcagggttgccatacggatagctgtcactgcatccagaccttcctccacacagatcttcaggtgattgtccagatgaccgtcttttaaaattgtcttcggctgtctgtcatctgaacagagcagacatcttctgctgttttccggtgtcactccttttaacagaggtcttaagttatgacatgcagacccctgtctgagcagaatgtacattccgcgctccagacgtgcttccatctcttctactgtagaacactcgtgatctgccagaatccctgctgcagaatatgcattcagatcttttccgtcaattccaggtccatgcccgtcgatcagttttccttcttcttttgcagtcatcagtttatccagcacactttcatccgcctgaataactccagggaagttcataaattctccaagcccgagaattccatctctttgaatcggctcttccatctccggtgcattgatcaccgcacctgcatgctcaaacggagttgccggtacacaggatggaagcatatacttgatatcaagtgctgtcccttttgctgcctccatcatgtagtccagacctttgatcccacacacattcacaatttcatgcgggtctgcaatgatcgtagttgctccatgaggcaccaaaagtctccccagttcttccgggctgacgtaggcagattcgatatgaatgtgactgtcaataaatccaggaactgcatatcttccctgcgcatccacttcatgaacgccctgatattctccaattcccgcgatcttatctccgctcagtgcgatgtcgcctgtctggatcttcccggaaaaaacattgacgatctgacagtttttaatgactgtatctgcgggaattcttcctgccgctgtgtcaatcagcttttttaattcttctttcttcataccgatgtcctccttggatttatttttcgtttacttccaaaaccggatcaaatgttgtaagcgcaagatagtcaaccggtcctacatccgtgatcgcataatccgggatggccgtaatcggcaaaaagaacatgtacatcattggatccggcagatcagaacctaacattcttgctgcctgatcgatcttcttctcctgtgccgcgattacctccggttcttcatcactgacaattcctccgaccggaagtggaagaaattccagaatctctccgtctgccacaacaacctgaccgccgccctgctcgatcagataattggctgcaattgacatatcctctgcgctgacacccataacaaccagattgttgtcatccggtgctgccgaagatgccatcgcacctttctttaatttccatccggaacaaaatgccagagatttatttccatttcttccaaatcgttccagaacagataccattgccacatcctgttctacatccggaagtacgattccgttttcaacttttaaaacaacatctcttctctttctgacaaatggtccttttacatccatcgaaagaacctttgcctctccgttctgaatagatgtcttatattcaaaatcttcttttgtcgtcagtttgcatttcaactcaccttttaacacagaacttctctccggcgctttcagatcataagtcagtttatggtcttttgctaccattgttccatttgtcatcacttctttgattccgaatgcttccagatcgtctacaaacagaatgtctgcaattcttccagggcagatagaacctaccatatggtcaatgcgatatgcttctgcgctattgatcgtcgccatctggattgcagtcatcggtttcactcctgcctggattgccagacgtactacattgtccagatgtcctttttccagaacatcacttgctgtcacatcatctgtacagaagctgactcttcttgcaaatgccggatttacctctgtcactgctctgatattctctgccaggaaatgtgttacggaagactcgcggatcagcatgtgcattccttttctcatcttctctacaacttcctcgtggtcgtagctttcatgatccaggcgcactcctgcacacaggtatccgttcagatcattgcctcttgccatcggtgcacatccaaataccggcagacggttcttgaatgcttctgcaattgctcccaatgtgttttcgtcttcttcctggataaactctcttactgtctcccatactccgtaacactgcggccatttctgtacctcttcatgtacctcttttgtaaagttaaatgctacagtagactgaggaattgtatatggtgtcttatacggtgctccccagaacactttcagaggactcgcctgtacctccttttgtacttcctgcagtccttccagacctgatacggaaatatattcgtccagaccggaaatcatgcttgtagtccctcttggcacaactgcttttgcatagcttgtaatgctcaacttgctgcactcactgtgaatatgaccatcaatcatacccggcaccagatatctgccctttgcatcgatcacttctgtctcttccccgatatactctttcacatctcccactgctacaatcgtgtctttgtaaactgcgatatctgccggatagatctcctcagacataacattgaccagagttcctcccatgatcacttttgttgcaggtgtctttgcacgtcctgcacgaatcagttccttcagattttctactgttgttctttccattcttttaaatcctcctgttgttttgagtaacaaaaaagatacaccggccagaggctaaacaggtttcccgtcctgcaaatgtatcttgaagaattttcaatattctgttgtcttcaacatatgttcatcatagcacattgttttcaaaatgaaaatataagctgttatgaatatttcctatcattattaagaagcacatcttatatatatatatattttttttttgccagagtagctggagaagtacttctgccaaaaaaactgccgcacaacatgtgcggcagcctcatactaaaactcaaactttttctcaaagtatgctttcagatcttcaatttttacacgttcctgttccattgtatctctgtcacgaacagtcactgcaccatcttcttctgaatcgaaatcataagttacacagaacggtgtaccgatctcatcctgacggcgatagcgttttccgatatttcctctgtcatcaaattcgcagttgtaagtcttgctcagttctgcaaacaccttctcagcgccttcattgagctttttagacagcggaagcacaccaatcttgacaggagccagtgccggatggaaatgcagaaccgtacgtgtatctccgccttccagttcttcctcgtcgtatgcgctgcaaaggaacgccagtaccatacggtctgcaccaagagacggctcaatcacgtatgggatatatttttctttcttctcatcatcaaaataagtaagatcctgtttggatacttcctgatgctgtgtcaaatcatagtctgttctgtcagcgattccccacagctctccccatccgaacgggaacaaaaattccacgtcagtagtcgctttgctgtagaatgacaattcttctgcatcatggtcacgataacggacttcatcgtccttgagtcccagagaactcagccagttcaggcagaagctcttccagtagttaaaccattccagatctgtaccaggttcacagaagaactccagctccatctgctcaaactctcttgtacggaatgtaaagttacccggtgtgatctcattacggaaagattttccgatctgcgcaatcccaaatggaatcttctttcttgaggtacgctgtacattcttaaagtttacaaagattccctgtgctgtctcaggtcttaaatatacgacattctttgcgtcctctgtaacgccctgaaatgtcttgaacatcaggttgaactcacggatctctgtaaagttgtgttttccacaggaaggacatttgatatcatgctcttcaatataagcagacatctgctccttgctccatgcatccacgcttccttccagttcgattccattctcctgtgcgtaatcttcgatcagcttatctgcacggaatctttcattacattctttacaatccatcaacggatcgctgaatccgcccagatgtccggatgcgatccatgtctgtggattcatcaggatcgcgcagtccacacctacattgtacggactttcctgtacgaattttttccaccacgcttttttcacgttgttcttcagttctactccgagatttccataatcccatgtatttgcaagccccccgtaaatttcagaccccgggtaaacaaaacctcttgattttgccagagctacaattttatccattgtcttttctaccataattctttgttcctcacattctttttcatcaactggtaactattataacggcttcatcccgttttttcaagccattcctggattccctgccattttcacgcgatttgctacaccaatgtctcaagaatctccagagacttgaaccttttttccacataaagcagacaataccgttccatgatcccggacagcttttccagtacttccctgctgactgtaaatgtatacagcttctcaatcgtactgctctctatgtactgcatcgtataaagtgtggaattatccaacgaaatcccgtctgaaatattcctggcacaatctgtacagaccagtccgccttccctggcactgaacaccatctgtccgtcttttttctgacaccggacacactgaaagacctgaggtccttctccattgatacagaacgctttgagttcaaaaatgcggcggatcagcaaattcggaatatgcgggctggtcagtgctttcatggtctgatacaaaagctttaacatctcccgttcatcattctgctcttttgtataataattcgcgaactccagaaaataaaacccgtaataagcaccgatcatatcttcccgaagctccgaaaaataatttgtgatcttcacagactggatcgtatgagaggaacgcccctcatacatcgtaaactccccaaaggaaaacggattgactgcacctaccagcgggctgtttggtcttctcgcccctctggcaaatgcagaaatctttccctgttcctttgtcagtatcacaacccgtctgtcatactctccaaccggtgccgtggaaagcaccatccctgtcaaaacaatctgattcacctgatctaactcctgcctgttccttctgttcttccaaacagcgactttcgctgctgccactttctgctttgtaagaaagataatctgcaatgcgtcctgttgtcataaactgttcccagtattcttctttcatcggttcacctctttaattgctttctcatctgttccttgttgagtatacaattagggtgtccgattctctcccggatatactatataaaatctgccaaatactacatctcgtcctcgtggtatccgaaattcttcattagaaaatcactgtctctccagtttttctgtacttttacccagagcttcagattcactttacagtccagcatccgctcgatttcatagcgcgccgtacttccgatcttttttagcatactgccctgttttccgatgatgattcctttgtgggaatcccgctcgcagatgatcgtagcatcaatatgcatgactttgttctgcattttcatgcgatcaatcgccactgcgattccatgcgggatttcttcctgcagacaatgaagtgccttttcccggatcagttctgccacaatctgacgctccggctggtctgtcacagtgtcttcatcatagaactgcggaccatacggaagatattttaaaatcactttcaccagttcatccgtgttgtccccgtttctcgcagataccggaacaatctccgcaaaatcatactctttgcggtatgcatcaataaacagcagaacttcctctctctttaccatatcgatcttgttgatcacaaggatcaccggtgtttttacacgtttcagctgttcaataatgtgcttctccccagctccgataaaggtggacggctctaccagccaaagtaccacatctacttcattcaacgtgcgttccgccacatttaccatatattctcccagcttatttttcgccttgtggattcccggcgtgtccacgaatacaatctgcccttcttccgttgtcagaactgtctgaatacggtttctcgtcgtctgtggcttgttagacgtgatcgcgatcttctgcccgatcagctggttcatcaatgttgattttcccacatttggtcttccaatcagtgtcacaaatcctgatttaaaatcatctctcatcaattttacgttctccttatcctgtgtttcctaaaacaacgtcttcacttccagaaacatctctttttcttcctcgatcttttcttcgcttccgatcacacagatctgctctgccttcagcattgcctccactactgctgcaagcgcacggatatcctcctgtgctgcatgcaggatctgactgcgctctgtacggatcatctcctgggatacatgattcatatacagattcatcgagcgatccccttttgcagccggattcatcgggcggtcaatattactgatcgttccaatgatatattttgtcatatcccgttcatcgactgtgaaattcttcagatagtctaccacaccttcatacacttccattgtctttttcaggttcggatcccggtaggagatcagatatccctctccaatccggttaaagttgctcatacatccgtatgcgccacctttgacacggacattctgccagagataatcataacttaagatcaccttcaaaatctgcagcgctccatgatactgtgctccatgatcgataaagtttccgacccttgccacatactgcactttggaagacgttttaaagccttcgttgcgttttctgccgtgtaatacacacggtatttcttccccgtccagttccggatacagtgtatccttgatctcacgaaatgctgcttccataggagcaagtccatcctctgaagaggtataactgatcatcacattgtccacacggaaaatctggcgggagagctgttttaagttttggatcagctctgcttttttctcttcaaaatgctcttcgatgtcacggactacctcataaaatccgatgccgtctgtgtcatccttgaatttggacaggggagatccataagacaatgcgcgcagtgtggatgtcgtatgtccggaagactggaaggacatctgcagtctggatttgagcattgccagaatctcttttaatcgtttttcatcatccagtctggattccatcagaatctcacgcatcatcgcaaacagaatcttcatctgcggatacaatgcctttcctttgatctcaaatgttgcacgaaaatccttctcttttgcctttgtcacatccggatataattcaagagaagttccgattcctcctgtatgcacattgatctcgttgaacagttctccatacccatagttgttcgtatcaataattccaagtacactctgcagaattccagtatatggaagcagttcttccgacacgccggaaagatcaaacatcagagtggcataaccgatgccgttggtctccacttcatgatgtaccagctgcacgccgtccacttccatctctttgttgtaaaccggagcaatctcttctgtgatatcggttctgttgagcaccggaatcttctccatattctccggcgcatcttctgattcctgatatgcttccagctctctggtatctgccaccagtttctcaatctcggcttcacttaatcctgctttatatgcagccagcttttcttccagttctttgtccatacgggctgtgcgtcctttttccggctttacgatcacaatggaaccgtgaggattgtccagcagatacttctgaatcagctcttcaaaatatccagtggaaacctgctcttttaaaaattcaaacgtcgggatagcctgcatatgcataaatggttcgttctcatcatacagccagctgtccatgatctgaagaccgtacatcagccccttcggataatttccaaaatctgcctctctgaagcggaactcgtgatagttgatccctgcctccagagattttttatccattccgtttttcacaatcgactggagtgtctcttcgatcacacggataaatgcctctttctggtcacgattcgcatttttagagacaatagaaaagatcggctgatagattccattgtcataagaacccatgatatcttttccgatgccggcatccaaaagcgcttttttcagcggtgcacccggtgcagatagcagtgcatagtccagaatctgaaatgccagatacaacttttcatccagacttgtcccgatgactttattataagaaagatacgtattatcctcctcagactcctcactggagatcgaatactccatctccagttctctgatctcttcaaacggtttctgatatttaatctcggaatccacttcgatcgcatcaaatgctgacagataattttcatccagccatcttaacttttcttccatgtccatatctccgtaaagatagatatagctgttggacggatgataatatgtcctgtggaaattcaaaaactgctcgtacgtcagctgcggaatcgcctccggatcaccgccggattcattggcgtaagaagtgtccgggaacagagaattctggatcacacggtccagcacaccttccggagacgaaaacgctcccttcatctcattgtataccacgccattgtactccagctttccatctgccgtatccagtttgtagctccacccttcctgacggaagatttcatcatgctcatagatgttcggataaaatactgcatccatgtatacatgcattaaattctgaaaatccttcgaattacagcttgcaaccggatataatgtcttgtccggataggtcatagcattcaaaaacgtattcagtgatccctttaccagttccacaaacgggtctttcaccggaaaatttttcgagccacacagcacggaatgttccataatatgaggaactccggtactgtccggagccggtgtgcggaatccgatcgtaaataccttattctcgtcatcattggcaaacagtaagatctttgcctggctttttttatgttttaacaggatcccttttgatttcaggtcagataaatcttcttcccgaattacttcatatgcattcaaatcataaatactcatcttcattcgctcctctgtattctgtaattgcatacaggcattataccattatctgcacaactttaaaaggggcgaactgatttcacgcttgcattcacacttgcagctttacacttgcagtcgctacgatgtctgcacctgttcccgccacattttcaagaagaacatctccgatttctaccggtgcatctgcatgcacatcctttaactgccgaatacagtccatgatcttctcttttgggatttctttctttgtttttaccgaaacacgaggctgcgttcccccggtcacaggtaccgtcgtcgttacgatccgaaccggatgcaaaatctctgcttcggcatattttgcccctctcggacaatgattgccggaaacactgaccacggttttattttctgtcactgctgtgatctgacatcccagagggcagcagatgcatgtcaactctctctctttcatatcacaattcctccatctgcagtctgatttcctttatttccgccactttttcaaacacattctccgggatcaggatttgttccatctctcccggcgctgctgattttttctttttctccaacgccagctctccattgagatatacctgcactttacacgccccgaagactttgttcacccgaaatcggatattcaatcctttctcctgttttctgtgaatctgggacggtactgtgtagcgcacgcctccctctgactgaatccggacgaacgtttctgtgacagaatgttctgtcttttgaactgctctctgcgcatactctgcagctgcctttcctgcccgcgtggcttcctctgacacaaaatccaccagatcatgtacatgcagcacattgccacaggcaaaaatcccctccacatctgtttccagattttcatccaccaacggaccgtttgtcacaggattcaaactgacctgcgcctgtctggaaagctcattttccggcagcagtcccacggataacagcaaggtatcacaggcatagaactcttctgttcccggaatcggtcttgcctgtgcatccacctgtgccagtgtaactccctccactcgttttttcccgtgtatctttacaaccgtatggctcaatttcagcgggatgccataatcatccagacactgcacgatatttcgcttcaaacctcccgaataaggcatcagttctgcaacgacattgacgtgcgcaccttccagcgtcatcctccgcgccatgatcagcccgatatctccggatcctaagatcaccacttcttttcccggaagatatccttccatattgaccagacgctgagcggttcctgccgtgtaaatcccggccgggcggtatcccggaatatttaaggctcctcgcggacgttctctgcatcccatggcaagtacaacagcatctgcctgtatctgacagattccccgctcgctgctcatcgctgtcacaccccgctcttttgtgatatccataaccatggtgtttaatcgatattcaatgtcaagcgcttgcacctgttcgataaatctcgccgcatactccggacctgtcagctcttctttgaatgtgtgcagcccaaatccattgtggatacactgattcaaaataccgccaagcctctcatccctctccaggatcacaatctttttggctcccgcagctttggccgccactgccgctgccagtcctgccggtcctccgccgataatcacaatctcatatcttaccatctttattcctccccacgatcatcccggaacctgctctgtttttcgtaatctcttcctgtctgatcttcaattcccgctccaggatctccattgtcttcggtgtacaaaagcctgcctggcacctgcccattccagctctcgttctgcgcttgattccatccatggtcgttgctcccagaggtctgtgaatggcatctaaaatttcaccctcggaaatcatctcacaccggcagacaattcttccataagccggattttttctgatcagctcatttctctcttttgctggcagttctgctggatttaaaattcctttcctcgctccgcaaaatgcaggattttctttcaaatctaatatttttttcgcaagctctgccgccatccttccaattgcaggagcgctggtcagccccggtgattcaattcccgcacagtcaataaatcccggcgcatcctccacttctttgatgataaattcatgtccctcttcatgagcccgaagccctgcaaaccctgtgatcacctgacgaaacggaatctctttgacgctgcgctgcgcttttttgcgaatttcctccattccctgcacagttgtgtctgttccttctttttcttctatatccattgcggtaggtcccaccagcaagtttccatgcacggtcggtgtaacaagcactccttttccaaattttccgggcaaagtaaatactgtgtggctgacatgccctcctgccgtcttatccaacaggaaatactctccttttcgagccgtaatgtgtatcttcttttcactcaccatattgtggaatacatctgcatacactccggcagcattgacgatcacctttgtttcatacatcgtatcctgtgtacagatccgatatccgcctgcaatccatctctcaatctttttcacttcctgatccagacaaaactccacgccattttgcgccgcattttctgcaaatgcgattgttagtccgaaggggcagacaatcccgcctgtcggcgcatacagcgcagcaactgcctcatcagaaatattcggttccaatgcttttaatacctctctgtccaggatctgcagaccttcaaccccgtttcgttttcctctctccagcaattcatttaacttctccacttcgctttcattggtgcagactacaagggaaccattcttcttatatgaaaaatccagctcttttgaaagattttccatcatcttattcccttctacgttcaatttcgcccttaaagaaccttcttttgcatcaaatcctgcatgaacaatcccactgtttgctttggatgtcccgcagcagatatccgcctctttttccagtacacaaaatcgtccctgataacgagacagttctcttgcgattgccgcaccgcttgctcctgctccgattatgatcacatcatacatgttatttcctcccatacaacacaaaagagcctgacaaacaacacatccttcgatgtgttatccgccagactctcttctctttggcttttctattctgttactattactatatacctttttttccggtattgacaagtgttttttgaaattacagacaattttctatgataactcttcttttgcccatccatgtgcgtactgcacagcttttttccatcctttgagcattttctgctgtttttcgatttcaatgtctggctggaacaccctgtcaatgtcccagttctgttttacatcttccttatccttccagtatcccactgccagacctgccagataagcagctcccatggcagtcgtctctacacacttcggcctgtgcaccggcgcccggctgatatctgcctgtgtctgcatcaggaaattattggcacttgcaccgccatccactttcagcgcagaaagagcgattccggaatctgctcccattgcttccagcacatcatttacctgataagcgagtgattccagtgtggcgcgaataatgtgatctttgttcacgcccctggtcagtcccacgatcgttcctctggcatactgatcccaataaggtgctccaagcccggtaaatgcaggaaccacatagcagccattggtatcctcaaccttctgtgcaagatattctgtatctgacgctgaatcgatcagacgcagctcatcccgcagccactgaatcgcagcacctgccacaaacactgagccttccagtgcataattaacttttccgtccatcccccaggcaatggtagtgaccagaccattctcggaaaagaccggtttttcgccggtgttcatcagcaggaaacatccggttccgtacgtgttcttcgcctctccctcttcgaaacaggtctgtccaaacagcgctgcctgctgatctcctgccgctcctgcaattggaatccttcctccgaaaaatccgggatctgcttctccgtaaacagcactgctcggctttgcctggggcagcatgcattttggaatatccaactcttccaaaatctcatcatcccactccagcgtattgatattaaacaacatcgtccgggatgcattggaataatctgtaacatgcaccgctccctttgtcagcttccagatcagccaggtctccactgtaccgaacagtaattctccccgttttgcccgttctcttgcaccttccacatggtctaagatccacttcactttcgttccggaaaaataagcatcgatcacaagccctgtcttcttctgaaacatctctgtcagccctttatctttcaggctgtcacagtactccgaagttcttctgcactgccagacaatcgcattatacaccggttttcctgtattcttgtcccacacgattgctgtctctctctggttcgtaattccgattgccgcaatatctgctgccgatgcattgatctgattcattgcctgtctcgctacagaaagctgtgtagaccagatttccctcggatcatgctccacccagcccggttttggaaaatactgcgtaaactctttctgtgccatactgcagatttcccctttttcattgaacaaaatgcaccggttgctggttgttcccgcatccagtgccattacatattttgccatttttatgccctccattataagttccagacatcctgattggtcgaagaaaccgcgatcgcccctgctgacagtgctgcgatcacatcctctttttctgtgatgagcccgccggcgatcatgggaatcctgctcacttttgcgattcttccaagtacttttggcatcactcccggaagcacctcaataaaatccggtctcgatgtcccacactgcatttccagattttcgatatttttgagtgccagtgaatcaatcacaaaaaagcgaagtaccgcaaaaatccccagttcttttgcccgccgcaccagtgccggttttgtcgtgatgatcccgtccgctcttgtctgcctggcgataaattccacagatatctcttttgcgctgagtcccgcaatcagatcgatatgtaccattgctttttttcccgcagctttgattctctccagaatctccggaatcgtacagacatctccataaagcacaaagatcacctgaatttcttccatctctactgctgcctgtaatccggcatcattttttactgcggcaatgaccggatttgcttctactgcctcataaaactcctgattcatccctcacctctgtatgtctttcgttttttcttattttaacactctggctgtaggaaagcaacagaatgtctatttttcatccactcatatcctgtgttaacttttacaagaaaagcctggaaatcatttacacattttgttgctgattcctgtagtatatcttataattattttagtaagttttctatacaagaatacacgcaatacttttagtagatagggaataccatgaaaaaattgttaccattattacttttcattttttattaatcataacaggggcttcgctactgagtaaagaaaatagcggaacatcaaagaaaaatagagttttcttattttaatagtaccccaactgatcagtcgactttagaagtatatttaattgacaaactggaaaaataaattatatacagttttgcaattataggttacagaatttttattactctgtaaacaaatctctatcaataagataaaaaatgctgctccctttctgttcaagggatacagcattttttctttttctgtgatcttttatgaatttttatgcttcacttttcttttctgcagattccacaaccggcgcatacacataattctttttgaatctgcgctttcttgtgatccacatcaccagggaaagtacaaacaatgctccaaatacgatcagcagtgtccttacaacatctaccactaaaaggccggtatctttgatctctgtatcttttccgataccgttcattccgctggaatttgcaattgcatacaggtttctgtgacatgcctctctcattgcgttgacaatgactgcatcatttttatagtctgggagctgctttgtaacatatggaagcatcgcgtcaaatgtagatacacctgctaatactccatccacaccatttacatacgttgtaagtacgttatctgtaatgatcagtccgtcacatccccattcttctctgagaattcctgttacaagcggcttgcttccacctgaccaggtacatccccagcgtgtgtaggcaatcatcacaccgttcgcatttcctttttccacaggagcctggaatgccttaagataaatttctctggctgcctgctcattcacccagactccaagaccgattcgatcctgctcactgtcattgagtgcaaagtgtttcataacaacaccaacacctttttcttcgattgctgccacttcatatgctgacatttctccagaaaggaatccgtcttcactgtaatactcaaagttacgtccaccataaggtgttctgtgaatattatttcccggtccgtaaaggattgaaacgcctgctttcagacagttgtttccaattacctttccaatttctgtcatcagatcgcggttgaatgttgctgccattacgtcctccgatgtaaatgcagttgcatccatctctgtcttatccgatgcgatcagagaagctgtcagaccctgcggaccattctcatctcttgttcccggtgcctgtacagattccaaaggcattgtccagtggaaggaatctccgatcagagaaaccatatctttaaagctcagttgatctaacagctcgtcccatgcttcatcgtcataggaaagcccgatcatatcaaccagttttttgccgtttttcgctttcattgtcggcatctttgcttcttcataatcatctggatcatactgtacatcctgcagatcttcgatcatctgctctgtcagcttcattttcaggatggactgcggaagtgttccttcccagtcatttctggatacatatgtaatctcatcttctgttccttcatacagattgatatctgcatcagaaagctgatttttgatttctgttccgtttgcggaaactgcatatgttgtgctgtcaaatttcggattgttgtatttgtatgtcagactggaatttccgtctgtatccatacgtccgtctgtgttgtctactgtgtatccctttgctgcaagaatattgttcactgcattatgggcatctgttgcaactgtcagataatagtccccttcatccagaatataagttcctgctccatatgtatcataagaagccagttctcttctatctactgtcatattcagcgtctcagatgctcccggtgcaaggatttctgtttttccaaatccacacaatgcaacggaagatttttctacaccattctcaatgtcatatgctgtatatggagactggaagtaaacctgaacagtttcttttccagaatactcttttcctgtatttgttacttttacagagacttcaaatacatctttttctttgttgtaagaaactttcaaatcactgtatttaaaatcggtataactcataccatatccgaatggatatgccacgtcatcatgatattcgtacgcacctgagtttccagactgcatcacataatcttcataacgtgtctcataatatttgtatcctacgtaaataccttcctgatagatcatgtatgtttttgcatgttccggaatgattccttcttcatatccttcatacactgtcggcacaaagttcatcattgccggtgcagagaagttgtcatacagataggtatccaccaggcttcctgaaggtgtcacatttcctgcaagaatctctgccactgcattgattcctgaaattccaacatccccgatccacatacatgcatccacgtcatattcattatttttcagaaaatctacttgaagtgtatttgccgagttgatcagaacaacaatctttttcacttgaccggcttttttcatttctgcaacgttctgaagcatttctttttcattgtcatcaagtgccagataatttgtctctttgaaatccagatctgcaccctctccaccaatacgggacaataccacaattgctgcatctccataggatgcgacagaatcttttacatcatctgtatacacattccacggaacctctgttgtcttttccccttcttctgcaaccatacctgcagtttttctggcgtacttgcttccttctcctttactatagaagttccagagttttttattgacctcaaatccacttttttcaagtgctgtcttcaatgtatctgccgaagatgcatcgatattaccggaaccggtacctccgtaaaccaggtttacagaagagtttgaaaagcagcttaccttcgcgcctttctccagcggaagtgcgttattttcattcatcagaagtgctgcaccctcttcttctactgtttcacagagctccagaccatactgattcatttcttctgttgtttcaaaatcagattcatagtatactgcatttttatcttcattcttcaacttccagaatgaaccgccgacaaacgctgcaactgtattgtcaaacatcgacaaaaatactaatatcggaatcagtacaatggaaatgatcccgctaaaaaacgtcagccccttccacggacgtgttgcttttctgcgcgccttgcgataggctttctttcgcacttttttctcttgttttgtttcattcattactcaattcctcccaattgcactcttagcttaaaacataagagcattcttttcgcattgatactatcttaacaattccacaatttttactcaaccgcttttgactaagtggtatttttgcacgcataagtgcaaaaaagttccaatgtccgaaatgcattggaactttttgatactattcttttatcggaaataaaattttaaggcaaaaacatccatccttgatctttacctgaaataccccattgtactttttcacactgttcttaatactgcgcagtccatatccgtgataagccttgtcatgttttgttgttaccggaagattgtcctcaaattccagctcttcctctaccggattcatgatctggacgatcagaaactgatgttgtctgtggatcagtacatcgatttgacgcttttcctgttttggtaaatttttcacacactcgatggcattatccattgcatttccaaagatcgtatacagatcgataggatgcaaaaactccagaccttttccatctgccacgcaggaaaccacaatatcattctccttgcatgcaagactcttctctgtcagaatcgtatccagtacatcatttcccgtctttaccattgcttcataaatctgaatggaatcctgaatctcttcgatatatttttcccgttcttccttggtgcacatgtcccgcaatgctgcaatctggtgtttcagatcatggcactttcgattgatgatatcaatattctctttcgcgatccgatagtgctctttttgctgtctccagagaagatccgaaaccagccgctcctgacgcatggcactctttttaaataactcattctgcagatacaatacaaccacacacaatatctgcatctgcaaaatactgaaccagtttcctccctgcagccctccgcttcggttgttcacacactgttttacaaaccacaaaaacaggtatccctgcatagccagcaaaaccagcgctgaggtcagctgtctcggcccgatcagaaaccgcttattttccggaatccagattgccactgtgtaacggcagacaatcaccccggctgttcctaccagcagcaaaacaatcggaaatacttctgccgggatctcccagcgttttcgcagcagccagcagaataccatactgagttcataagcaagacaccaggtacaggatgcccatactgcataataagatgcgaccgccatcgtcatttttacattcacccacagtgacagcatcatcatcacatatcccagtgccatccacatcatcgctccaaaccagttttccacctgaaacaataaaaacatccctgcctgtgccagaaaaattgctgccgctgtcactacaatagaatatcgaaaatgctttctttttgaaaaacctgctgcataaataataccaaatccaagatagatcaatgtcgccagtatattcacaatccaactcatcgttaatttccttctcctacgtagtccatcagtgcattcaggaaggtattctttttacgctgactgatctccagctcttttcctgctacaatcaccgtactgtccctgacctctgtcacatatttcaaatttacgatataccagtggttacactttacaaagtgatagggggaaagcatatccaacgcattctttatcgtcccacgtaccacatattcgccttcactcgtgtgataatacaacattctgttctgtatttccacataatagatttcctccacaggaaccttcttgaccgaatcctgctgctttaagagaatctctttttctattttctgaatccgcccgatagctcttgtaagcttcaatgaaaaggtgtagtaatttaccggcttcatgacaaaatctaaagctcccacagaatatccgcgaattgcatactggatcatattcgtgatgaacatcagtacaacgtcttcatctgcctgacggattttctccgcggcttccatcccattcatcccgggcatctcaatatccagaatcacaatatcataaacgggactgtacccctcaatcagctctttcgcatctgaaaaagcagtcaactgaatatcctcaccattctctttctgatatttttgtatatatttttcaatttttgctaaaaacgctgcatcatcatccgcaattgcaatccgaatcactctctcacctccattttttgtatttctttttgttgtactataaaacctgtctcaagatcctttcaccgattcaaaagccgttttttgattgtctctccgttttccatcgagatatatggaatctcctgtttccggtttgcagtcgatgcaagcagatgaacctctcctttttgaagcttcaccactctggcaaatatgttttgtgaaaattctacatattgaatatctttgtaagatatgtaacaaattgttcttccaaaatatccatttacaatcgccatatggcttacccccacagtgcttcccgccgtcaggaaatatgcaagaacaagcaatatcatccatatgctaaaaataagcactcccaaaataatttccttttggaactccggaaaataataaacagaaagcagtgctcctgcgacaagaaacaatgcaaaaagaactgccggccaaatccaggcaatccatgttgctattggctgccgtacagtctgcatctgtactgcttcataaaattcaggaagtaataagcgaatccgctcttccatttgatttcgtttacagtacggaagaaaaaaagattgggtttccgcggcatcattccccattccgatattgatgatctctgctgtatatctcccggtcagtcttgcaaaaaatgtttgctttaacttcagtgcgctgattttctctgccggaattgtgtaatttacttttttcaaaatcccataacgaatgtataatttattttcattccgatcgattttaaaatcataatactgaataaatccttttacaatattccatatggcagaactgaatatggcaatcagcataagaacgcttaacagcatttttacaatactttctcccacactgacagaatgtatcacttgcagaaccatccctgccgctccgacaacgcatccaattactaccaatacggaaagcagattgacagaaaacagcccatgtgtaaaaatatcccccatattcgtttgaatcgcccagtgatctttgtcttctttcgaatatttcttctcaaagtctccttcctgtccctgcattaacttcatcacatataatcgaaactgctcagcctccgcctttttcaatatgatctttacatctgttttatctgatgtagacatactgttcgtatccagcttcactttacatgttccaagaagcatttccaacaaattctgctctgtatttacattcgaaatatttttgagaccaattgtatttttctttttattccatgtattacgctcaatcacgatactgttgtcacagatcgaaatgtaagtcttcgaccagatgatccactgatataaaaatatcagcagaaaaactgccaatatcactccgccgccaatatataccgtgagacttaattcttccgatgaccccttttcaatataatcaattacatcgtcgatgttcgtaaaaaacaacacaaaaagaattccaaatgttgctcccaactgctccagtatcacggaaatgtgattgcgaaatctgatcttattctccatcttcttccctctgttctttcacaatctcattgatacgtttctgtagattttctgcaattttttccgccttttcttcctccagaaagcgaagcgttacatctcctcctgcggtagtaacagtcacttttgccacatgaaagatctgatcaatcggaccttttgatatctcaagcttatgcagacgttcaatcggcacaatatttctcttcacaaagagatacccttcccgtatatcaatacattcctcattaatactgtatcgatatctgttataacggaaataaggttctaccagcatggagactgccgcataaatcagcagaacagctgaaatccatcttccaatttcaatctgttttggaatcagccagaagatattcacgatcccgattaaaacaataaagatcacatcgccgattatttccgcagtatacatgcaccccaatgcccgtctggaaagcttttcatatgccatacatttcttctcccttttattccaattcctgtatcaattcagaaatcaacttttcgtcctcttccaactcttctgcaatttcagaaaccgacattttctttagcaatttcttttgaatcagttcctttagaagttcccgtctgccggacaattttcctctctcttctccttcctttataccggatagtctgccttcttcccatccctcttcccaggatgcctcccgctcctgcctcatatgcttttcttcatcatattcatagatactcacttgcttcacctccgctcggttttgtgtcaaaaactctgccagaatatcttcctcaatacattcgcggattgcctgctccacagcctcactgatgggcattgtacagatcgagcaattccttcttatcctgatagagcatggcaaaaatacgtgacttgtacagtctgtttgccgggagttctgtggtttgcttcataaagcttcctcctttaattgaatcgttacaggaggttttcaatccgacatctttcttctaaaaacctctctgctgttttaagttgatatcaaagcatagagattttccgatatgactttagaataaaagatgcggaatggttccgcttagaaaaccagaaataatgcttcctgtattgtaacacgattgcacagaaagaggaagaagaattttttctttttcagtaaatatccaatgtattcatctgaaatgctatctaaccgtataattcatgtttccaaaaaacgacgccggactttccccggcgccgtttctttcaaaccattgattcaattttacttttcaaaagaattagtcttcttttgctgtaccatcatagagatttaccaatcccttcaggtattcgtatctttccatagcctcagcctcattctgcgcgaagagtctctgtgctttttcaggatttgctctcatcagggcattgtaacgaacttctccgttcaggaattcctgataatctcccttaggctctttgctgtccagagtaaatttcttctcagcttccggattgaatctgaagttgttccagtatccgcattctactgcaagctgttcctctgtctgtgctttgctcatacctttcttgattccatggttgatacatggagcgtaagcgatgatcagggatggtcccggatatgcctctgcctctgcgattgctttcactgtctggttgaaatctgcacccattgcgatctgtgcaacatatacataaccatagctcatagcaattcctgcaaggtctttcttcttcgtctctttaccaccggccgcgaactgtgctgtcgcacctgtcttagtagcttttgaagactgtccgcctgtgttggagtaaacttctgtatcaaataccatgatgttgatatcctgaccgcttgccaatacgtggtcaactccaccgaatccgatatcgtaagcccatccgtcaccaccgaagatccactgggatttcttcgcaaggaagtctttatttttcagcagttctgctctctcagcacatccgcagtcacagtcttccagagcttttacaagcttctctgtagctgttccgtttgttgcacctactgagaatgtatccagatattcctgagctgctgctttcacatcatcgtttgcaccgttctctacaagtttctctacagatgctttgagtctttcacggatcgtattctgtgcaagaagcataccatatccaaactctgcgttatcctcaaacaatgagttagaccatgccggacctcttccctgtgggtttactgtataaggtgtagacggtgaagagttaccccagatagaagaacatcctgttgcatttgcaatatacattctgtcaccgaataactgtgtgatcagttttgcataaggtgtctcaccacaacctgcacaagctcctgagaactcaagcaatggctgtttgaactgacttccttttaccgtagtctctttgaattttgcaacaacttccggtttgatcggaagctctgttccataatcaaagaatgtctgtcttccggcatttgcttccatgtttcccataacaagcgctttttcacccttcttaccaggacatacatttgcacaagatccacatcctgtacagtcataagcagatactgcgatcgagaacttcatgttcggcataccgatcatgtcgatcatatccataccttccggtgcgtttgctgcttcttcttctgtcaaagcgatcggacggataactgcatgcggacatacatatgcacagcggttacactggatacagttgtccggctgccagatcgggatatctactgcgattccacgtttctcatatgctgaagaaccggatggtgtagaaccatctacatattcattaaatgcagataccggaagtgtatttccttcctgtgcatttacttttgcctggatattttttacaaaatctacaacgtctgctcttccgccttctccaacgtgaggagttgtaagaccttcatctgctgcatctttccagctttccggaactgcgatttctacaacctgttttgcacctgcatcgattgcatcgtagttcatctgtacgatcttgtcaccttttcttccgtaagtagcttttgcagctgctttcatcagatcgatcgcttcctcttccggaatgatcgctgcaagtttgaagaatgctgactgaagaactgtattgatacgtccgccaagtccgatttctttaccaatcttgataccgtcgatcgtgtagaacttgatattgtgatttgcaatgtagctcttaacctgtcccggaaggtgctcttccagtccttccatatcccatgaacagttcagaaggaatgtacctccatcaaccagttcctgaaccatgttgtacttgtcaacataagaaggattgtgacatgctacaaagtttgcctgacggattaaatatgttgatttgatcggtgacttaccgaaacgcaggtgagacattgtaacaccaccggattttttggagtcatagtcaaaatatgcctgtgcatacatgtctgtgttatctccgatgatcttgatggagtttttgttcgcaccaacagtaccgtcagctccaagtccccagaatttacagttgatcgttccttccggtgttgttaccagaggttcgtcagctttcagtgacaggtgtgtcacatcatcttcaataccgattgtaaatttctgtttttcatcgttgtgatatactgcaacgatctgtgcaggtgttgtatctttagaacctaatccatagcgtcctgtataaatcggaactgcatcaaattttgttccctttaatgctgcaacaacatccagatacagtggctcgccaagtgctcccggctcttttgttctgtcaagaacagaaatcttcttcacagaatccggaattgcattgatcagtgcttccgctgagaatggtctgtaaaggcgaacttttacaacaccgactttttctccggctgccatcagataatcgattgtctcttcgatcgtatcacagacagaacccattgcaacgatcacgtgctctgcatcttctgctccatagtagttgaacagtttatagtctgttccaatcttctcatttactttatccatataattctgaacgattgcaggaagtgcatcgtaatatggattacatgcttctcttgcctggaagaaaatatcagggttctgagcagaacctctctgacatggatggtttggattcagtgcgtgtgcacggaattcgtcaattgcatctttatttactaaatcttccagatcttcgtaatcccatgtctcaatcttctgaatctcatgagatgttctgaatccgtcaaagaaattgataaacggaatctttccttccaatgctgcacagtgtgcaactggtgtcaggtccataacttcctgcacactggattcacacagcatcgctgcacctgtctgacgacatgcataaacgtcagagtgatctccaaagatagaaagcgcatggcttgcaagtgcacgtgcggatacgttgaatacacccgggagctgctctcctgccactttatataagttaggaatcatcagcagtaatccctgagatgctgtaaatgttgttgtcaacgctcctgctgcaagagaaccgtgtactgctcctgccgcacctgcctcagactgcatctctgttacatgaacagttgttccgaaaatattttttcttccttctgttgcccactcatcaatatgctccggcataacggatgacggtgtgatcgggtagatagctgcaacttctgtgtatgcataagagacatgagctgctgcctggttaccgtccatggttttcatttttcttgccatttcttgttcctccttcgaaattacattgtaaaacgaattttttacatgtaatctcattatatctcgattagttgtaaaagtccatacgagccgtcccatttcttgtttcttttttggtgcagttgtctggtttctctttctgattttcttttggaaattctatttccatgcagaccggctgcagcttttcgtataaaataaaaagcacctcccacggaagtgcctgtcccctcttgtattctctttttccatttaccatgcatgcagccagaattttcctaaaaaccagataagaaatgcaaaaattgccatcactccgattgcaagcggaagcagaagttcacagaatgccagaataactgccagtttgtcttttcggctcatctcgatcggttcctgctttttcttttcttcacgcgctttctttttggcttcttttctgactgtgcgaagacctttttcaaattcgattttcttcttttgtccatccggctgtgtgtctgactttttcgctttttcttcctcttcaaacagcagatccggccttggtccctgtcccagtttcaatagatttttcataatgccctctttgaaaaatgcccccgatgcgattaccgggggcgaaatttaagttttccttacattttttgtattgtcaaaagattttatacatagtgacaagctacaaagtgttcatttcctacatctctgtactccggtgcttcctgtgcacatttctctgtcgcatatggacagcgtgtacggaatttacatccggacggcggattcgacggagaaggaagatctccgctcaaaatgatacgatctctctttcttgtcggatccggcaccggaatcgctgacatcagcgcttttgtatatggatgcagcggattgtcgaaaatttcatttttatctgccatctccacaatatttccaagatacataactgccacacgattactgatgtactctacaactgacaagtcatgcgaaatgaaaatgtaggagaagttgtttctctcctgaagatctccgagcaggttgatgatctgtgactgaatagacacgtccagcgccgataccggctcatcacagacgatcagttccggattcagaatcaggcttcgtgcaattccgatacgctgtctttgtccaccggaaaactcatgcgggtaacggttgatataatacgtaggaagtccgcagatttccattgtctccaataccttttcacgtgcttctgccttactcatcaatttgtgatcaagcagagcctccccgatgatgtttccgactgtcatacgcggattcaacgaagcgtatggatcctgaaataccatctgcatctgcagacgttttgcacgcatttcctttttggaacattttgcaaggtcctctcctttgaaaatgacctttccgtctgtgatatcatgcagtcttaagatcgttcttccggctgttgattttccacatccggactcacctacgattcccagtgtctcaccacgtctcagtttgaaagaaattccatctacagctttgacatgtccgactgttcttgtgatcagaccgccacggatcgggaaatattttttcagattctggacatccaaaatgatttcattttctctgttcatttatacttcctccttttccggtgcgttgacaaagcatgcaacataatgaccgtttccaacgtgtaccagttttggttctttttctttacagccttcctgacagaactcacatctctcattgaaatggcagttctccggcatattgatcgggttcggaacctgtcccgggatcgaatacagacgctcattgtgattggtcttaccgatgatcggttttgattttaacagcccgattgtatatggatgcatcggattctggaaaatatccagtacttttcctttttccacaacatttccggcatacataacaaccacgtaatctgccatctctgcaacgacgcccagatcatgcgtgatcagcatgatggacatatccatttcctctttcagcttgcgcatcagatccagaatctgtgcctgaatcgttacatccagcgcagtcgtcggctcatctgcgatcaacagcttcggattacataccagagccattgcaatcatgatacgctgacgcataccaccggaaagctcgtgaggatagcattccatgatttcttccgctctcggaataccaaccagttttatcatttccagagcttttgctcttgcttcttcttttgttgcatctgtatggaaaagaatactttccatgatctgatgtccgactttgagtaccggattcagagaagtcatcggctcctggaagatcattgcaacatcttttccgttgacatgctccatttcgctcttgctcagcttcagtaaatctcttccattcatcaggatctcaccatccacgatttttcccggaggtgactgaaccagatgcatcagagagagtgaagtaacactctttccacatccggattctcctactacacagactgtctctcctttgcggatctcaaaatcaacgccgttgactgccttgacaattccagcgtctgtatagaaccatgtatgcagatttttaaattctataaatgccataatttttctccttgtcaaaactttcttagcgtttcattttcgggtcaaatgcatctctgagaccatcacctacaaggtttaccgcaagtacagtcagcaggatacagaatccggccggcatccacagccatggacgcagtttgaatgtcatcaggtttgttcctgcagataccatctgtccccagctggacatcggaggaagtacaccgactcccagataagacatggtggattccatgatgatcgtatcaccgattgccagtgttgctgtaacaatgatgatcgggataacattcggcataatatgtttgaaaatcttatgcagatcgcggataccaagtgattccgctgctgacatataatccatctcacggatcgaaagtacctgacctcggatataccggcacgtaccggcccatccgatcgccgcaaggattaccatcagataatatacacgaactccggtgtccactttccagtctgacatcatggcactgagcatgatcagaatcggcatcgtcggcagagacagaataacgtctactacacgcatgatgacaaaatccacaactccaccatagtatgctgcggtacaacctaataatgcaccgataaagatctgaagtgctgtcgccgccagaccaactgtcatggaaatacgtcctccataaagaagacgggtaaagacatctcgtccattttcgtctgttccaaaccagtgctgtgcactcggcggctgttttgcattcgcaatatcagttgctgtaatatctgaatacggagatacgattggtcccacaatacaaagaacgatcatgactcctaaaaagatcagtccggcgatcgccagcttgtttctggacaggcgcttcatcgcaagtctccagggggattccatgcttttattctctgctgcctgttttgcaattttcttatttgcatcttgtgtttttttcacgtgtcctcctcctttctacttcaaacgaatacgtgggtcaaccgcaccatataacaggtcggaaagtaagtttccgagcattgtaagtactgcaaggaacattgtgaatcccatcataaagagataatctctctttccgatagaatccaggaatactttaccgattccaggccatgcaaatacagtctctgtgatcatcgcacctgcgaaaagtcccgggatcgcaccaccaacataagttacaatcggaatcatcgcattctttaacgcatgtttgtaaattaccactttttccggaagtccctttgcacgggcagttctgatgtaatcctgattgattacctcaagcatggatgtacgcacataacgcatggtaccacccaactggatcactgtcagtgtcacaaccggaaggatcatatgaagcactacgtctaaaacataagccccgcctgtattgtttgctccggcagttatcataccgtcaagaggaagaacccccaacttgacagagaacacatgccgcagaatcattgccaggaagaatgatggcagtgaaataccggcaaatgctactaccgagaatgtattgtcaaaaattgaatattgcttggtcgccgaaataacgccgattggaatcgcgatcaatagttgcagtatgaacgctacagcagctactaaaaacgagttccatacaaatttaccgatgacttctgttaccggaatcttgtaactgatcgagataccaaaatctcctctgatcgcatgacttgcccagtttacgtatctttccggtatcggtttgtctaatcctaaaagtgctttgttctgcgctatcttctccgctgtgatgtttccgcctgcatgagcatcaacggcatctcccggcagacttgctaccaaaagaaatacaaccatagatacaccgatcagaataggaatcatcgtgagaacacggcgagttgcatatttccacatttgttaaaaacctccaatctttatttgactctgttttgctcatgatcaaataacttaattttgcccgcaggaaatagaacgaatcgagttcgtatccaccccctgcgggccgtttgttcgaagggaaacctcgctggatccctatttgagcttcaagtcttacggctttgttatttttttagagtacttcgattactcaacttcaatgttgacaatcttatcctgctgataccattttacatatgagctctgctcgatgttctgtacacgagtgttgtagcagatcaggtcacatctctcgtaaatcgggtatgtcggaagatcttcattgatcagtttgtaaatttctttgtatttttctttctgctcttctttcgaagtagaagccagtgcctctgcgagcatcttgtccagttctggatttgcatatcctgtgtggttctgagatccgcctgcttccggacttgcaaatgttcctgtcagatctggatctgctgtcagtccccatgccatgaacagcatatcaaatgtaccgttctgagatttagactgcagtgtcggccagtcaacatactctgcctggaagtcgataccaagctgtccgtatgcgtcgatcatcagtgggatcatagtatctgttacgatgtttccagacattgcactgaagacgatcttcatctgttttccgtctttcatcagcttgtcgccgtctttttcccatccggcttctttcagaagctctgctgctttgtcaagatcataatcgtatgtttccagaccttcgtcatcatacagccatgaaatcggcgcctgaggaatattcagtgtgattgcatactgtccgtaaacagcctggttcagagacttacggtcgattgcatgaagcagcgcctgacgcacttttgcatcctggaaaatctcatttttatggtttactgccacatatccatatccaagagtcggctggatcttcatgttgatgaatcctgctgcctgtgcttcttcgatgtggtcatcatcgcagacaacctgatcgtggatatctacatcacctgtctctactgcctgaagctctgcatttgtagcaacaactttgaagatcaggttctttgtcttaggctctcccagatagaagttcgggtttgcttccagagtcgcagatgttttttctttgtactctttcaatacatatgcaccattcgatacatagtcaaccatattcaatgatttgaatttagaaaggtcacctttcttgatcagatctccatattttgctgtagagatcggcactgcagaacctaatacataaggtgcacttgtgtttgctgcttccagagtaatctggattgtgctttcatctactaccttgataccggaaatctcagttgcacttccgtttttgtaatcttcatatcctacaacgtttactttggaaatatcctgatatccatcatagcttggatctgatacgactttataccagtttacatagtcttccgcttttacgtctgatccatcgttgtatttttcttttgtcagcttgtatgtgtaaactttaccgtcatcagaaactgacatgctggctgtaccgtcaacgatctctcctttgtcatcattgacactcagagatgccgttgtagctgtcacaacctggaaatcctcatttgcttcccagtataccgggttgaatacacctgcaaagtctgcaacacctgcgatcagtgtgtcttttctctttgctgctgtctcaggaagtgcagaaggatcctctgcttcgatcagctggtttgttgcttctaatgaagtatttgtgtcctgtgattctgttttttcacttgttttcttattgtctgacccactgccgcaagccgcaagtgaaagtgccattactgccgctaaaaggcaagctaatgctttctttttcatattttttcctccttgaaaaatatttatgttgattcctgcatcttccgatttatttactctgttttttcatagccgtattacccatctgttgctgaaaatgcggaaacaaacacgattcatcgaccgggctcttatttcatcattactcccagtttttctgtcagtgtgcgtacgcatccgtcttcaaacggaacctgaagccccacttcttttaacatctctgtatagaaatcacttgcagataacctgcacagcttcaaatagctctgccatgccgctttgtagtcttcatccatccagattttgtactgcatcgcacaggtctgtgccagtacatagtctatataataaaacggagtatcataaatgtgaagctgtttttgccaaaaaccacctttttccataaatggatctccttcgtaatcaagatgtggtttgtattcttcctccagcttcttccatgccgcatgtctctcatccggtgtcagatccggattgctgtagacaatatgctggaattcgtccaccatgcatccgtacggaataaatgcgatcgcatcttccagatgcatctgtctgtatgtgtcagcttcttctttaaaaaacaaattcatccatggttctgtaaagaattccatagacatagaatgaatctctgctgtctccatcgtgatatcccaatgctcttcgatcggatcacttccagaaacatatccctggaacgcatgaccgcactcatgtgtcacaacatccacatctccgcttgttccattgaaattggcaaaaataaacggtgcgcgatatttcggaagatatgtcatataaccgccggccttttttgtctttctgccgagcacatcaaagagttcattctccatcataaattcaaagaactcttttgtctccggtgaaagctcctcatacatcttctgtccattcgccatgatctcttccggagttccctgtggttttggatttccgtccacgaaatacatgttctcatcaatataagaaagcttctgaagaccaagtcgttcccgtcttctctcatgcatcttttctgcaagcggtacgaaatactctttgatctgtctgcggaaattctccacctcttctcttccgtaagaattgcggttcatccggtaatatccgagttctacataattctcatatccgaggagtcttgcctgtgccgtacgatttttcaccagtttatcatagatctcatccaactcttctgctttactctggaaaaacgcgctgtacttttcatgcgctctgcgtctgatctctctgtcctcatgtgtcatatacggacgcaacagggacagattcaatgtctcaccatcccagtcaatcttcgcactcgcaatcaaattgtcataccgggttgtcagcgcattttcttcctgcatcaacggaatgagcttctcgtccatggccttgaattcaagctccatactcttaaatgccacttttccgatcttctcttccagttctgctttgtatggagaataataaagtacttttctgtattcagtctcctgattgctgatcgtaggcagtacttcattataatagtccttctcttcactgtagaatgcatcagcagtatctacatcactgcgaatcatcgcaatctgaatcatcgtgctgtactcgtcacgcagctcataaaacttttgatgaatcgcaaactgctcttctccgctctttgcagccttcagttcctgtgtcagctctttgagccctgccacaacggcatctgtatcaaccctctgataaggcatctctgcaaacttcatagcctttcctccttattctatctatctgcttttgcccttttatattttttctcgttcctagtgataataaatcaccgcgctaaagtgttattattataaattggtattcagatttttttattatataccacttccaacacgatttcaagttatttttaattttatttttgcaatttcaatcttgttttcttgcattttagcacttttttaacttctattgagagataaaagaacaaaaaactgcagcgaaagcactgcagtttttcgtttttgtcctttatttaacaaattttattttcctgtacttttttttgcaagcatcgaatatctggaatgattttttctcagatacacaagcaaaacacctgttgtcactaccagcacatctgccagaagctgggaaacaggaagtccgattcccggcaggagaagctgatctgtccggagtccttcgatccaagcgcgtccaagtccatacccgaacatataaagaaggaacaactctccctcgtattttttatgctttcgatatgcaaacagcaagatcaaaagagcacagcaccacaaagattcatataaaaaagtaggatgcacctgaatgtattctacgccatcgatcatctggatatgtgctctcatctgctctgtcacatcagagcttctcactgcatcgatcggaagccgcatcgcaaacaaactgtccgtatatccgccaaacgcctctctgttaaagaaattcccccagcgtcccagcatctgtccgtttaacagggcaagcgcgatcgtatcaaaaatctggggcgcactcaaatgcttgatcttcgctgcaatgatcacagtcagtactgctgcaatcacaccgccgtagattgcaagaccgccttcccggatattcaaaatttccagaagattgtctttgtacatatcccaggaaaagagcacataatataatcttgctccgatgatcccgaatacaacaccgaacattcccatatccagataactctccggatcctgtccggtacgcttcgcctctgatgtcgcgatcacaaagcccagaaggatcgccgtgccgatgatgattccgtaatatgcgatctcaaatccaaataccgagattgtctttccgacatgttccaaatggattcccagatggggaaaactaatatcatagtgcatgcttcctgcctccaattattatacgttaaagcggaatacgataatatctccgtcctgaactacatactcttttccttccagtcttaccagacctttctctttggcagccgcatgtgttccgcatgccatcagatcatcataacttaccacctccgcacggataaatccacgttcgaaatctgtatggatctttcctgctgcctgaggtgcctttgttccctttgtgatcgtccatgcacggcactcctgctctcccgctgtcagatagctgatcagtccgagcagatgataacttgctttgatcagtttttccagaccggactcctccagaccaagatcatccaggaataactttttctcatcctcatccagctctgcgatctcctgttcaatctgtgcgcagactacaaatacttcacagttctcttctgctgcgtattcccgcactttctgtactccggcattgtctgcaccgtcatttgccagatcgtcctctgtcacatttgccgcaaagatcaccggcttgtatgtcagaagattgtagcttgtcagccactcctgttcttcctcatcgtctgttgtaaagctcttcgccatcttattttcttccagatgctctttgatgcgttttaacagctccagctcttttgctgctgtcttatcatttctggaaagctttaccacttttgcgatccttctctccaaaatctccagatcggaaaagatcagttccaggttgatcgtctcgatatcacgcagcggatcgatacttccgtccacatgtacaatattactgtcctcaaaacatctcacaacatgcacaattgcatctacttctctgatgttggcaaggaactggtttccaagtccctctccttttgatgccccctttaccagacctgcaatatctacgaactcaatggctgccggtgtgatcttctttgtattgtacatctcacccagaacatccagtctgtgatccggtacggtcacaactcccacattcgggtcaatggtacagaacggatagtttgcggattctgctccggcttttgtcaacgaattaaataatgtactctttcctacgtttggtaatcctacgattcctaatttcattttttctatttcctcctctaatcccgcgtctccatcaagatcacaatcccttccggaaacgtaatcctgaccgcctcctgtgcaaatgcattgctgacacagagactgtcatacgccgttaatttatgatttttcagcggatacttcgctccctcaatattaaatttctccacactctctcccagtggaaacaccgaaaagtacggtccgtatgcatctttctttgaaagtgtgatttcccggttcaaaagccggatctgattgtgactgtccactatccgcacatctgctcctgcatccagtccgatttttaaacattgtacatttgcccatatatgatcgatccgatttccggtcgctcccaggatcaggatgttctttcttcccaaatccagacacaagcgcagtgcgatttctgtatctgaggcatctttgaccggattgaacttgcggatcggcacttttgtttctttctcatagtaccccaaaatttcaccggatacgctgtcaaaatctcccacaatataattcgggcagatttcatgcctgtaaagaaactccagtcctctgtccactcctatgataaactcaatctccggattttccagaacagatcttgcaaattcttcttccagcatcccgccgcttacgatcacagtccatctattcattggcgcttaaaatctccataaatccttttacgttctcttctacatttcctttaaacacagcggatcctgctacgattacattcgctcccgcatccagaacttctttgacattgctgtggtagattcctccgtccacctcaatatccgcctgaatctctcttgtatccagcagatttttcagctctctgatcttatccagtgattccggaataaacgcctgtccgccaaatcccggttccacggacataatcagaaacatctccgttttatccagtaccggttccagtgcagataccggtgtattcggtttaatcgatactcccgccttcattccgcatgcatggatcttatccacagtttccaccagattctcacatgcttctacatgaaccgtcagaatatcagctcctgcttttgcaaaatcttccacataacgaatcggctctgtaaccatcagatgcacatccatcacctgctgtgtatgccctttgatggatgcaagaaccggcattccgaatgaaatactcggcacaaacattccatccatcacatcaaaatggatatactccgctcctgctgcttctgtctcttttaactgctcgccaagtcttttaaagtctgccgacaaaatcgacggtgcaattctgtttctcataaatcaatacctcttcttttctttcaattctgtatacatctccagataatttttatatcggaccggatggatttttccttcttccagcgcctcttttaccgcacatcccggttcatgcacgtgatcgcatccctgaaaccggcactgcccttcataagaagcaaattcccgaaaatagtacttcaattcttctttttcaaaatcattgacataaagtgagctgaatcccggcgtatccataatgtaggaatccgcatctactgcgatcagctcagaatgccttgtggtatgctttccacgttcaatctttctgctgatcgttccggtttccatctgcacctgattctgaagcagattgatcagagacgatttcccgactccggaaggtcctgcgatcgccgttgtctttttcagcagaagacgacggatttcttctatattctcctgctccagtgcgctggtaaatacgatcggatatccacatttctcatagattgcttctaattctgcaatttccggactggtcgcaatgtctttcttattaaaacacaaaactaccggtatctcttttcgctccatcatgaccagaaaccggtccagaagattgaaatgcggcgtcggctttgtcactgcgaacaccaccagtgcctgatcgatgtttgccactgccggacggatcagctcattctttctgggaaaaatctccacaatattccctgtcttattttcttcatccagtatttctattcggacattgtcccctactaaaggtttgatcttctcttttcggaacacgccttttgccttacactcataaacaccggattctactacgtttacgtagtagaatccggcaattcccttgattatttttccctgcataatttcctctgctgtcagtggttcgctcctgacgatgaaccaccgtttgatccgctgtcatttccattattgttatctccgtctgtcggcggatccggtgtcacattttccggtccgagactgaccacaatatcaactgttgaccctttttcgatctgacttccaggtgtcacagactgactgattacatatccttttgtaacagtagaatcataagattctgtcacattcgctgtcagacctaagccggaaagctttgcttctgcctgacttcttgtcagaccggagagagtcggtacttctacagtctctgtcttcttgcctttgctcaggacataattgacagtcgttcctttttccacctgttcaccggctgccggcactgtccggataatggtgccttcctcatactcatcactatactcactggagctttcacttccaagtgtcagtcccactccctgcagcgtagtctgggcactgtccggatccgcaccggatacatccggtacactgatcttctctttgcccatgctgacaaccattgtcactgtattgccctctgcccactctgttccggctgtcggatttgtggaaatcacatatccctgcggcacactgtcgctgtaatctgtctcagatgccacaacaaaccctttgtcttccagctgcttttgtgcatccgcctcagattttcctgttacatccggtactttggcagttttttctgccggtccgctgctgatcttcacagtgaccgtcgaattctcttttactttttctcctggttttggatcctgttccgcaatctcgcctttttcatatttgtctgaagcgacctgacctgctgactgatatccgatgttcttctttgtgagtgcttttctagcctcttcttccgtcattccccgaatatccggtacagaaaccttcttttccttctcttcggtcactaccttgtcaggcatgaatccgccgactgccttactgattccaaagatcactccgatcgcaacaataactgccacaacgatcatcaaaatctttgtgacctttttcatctgtggatcgacttcttcttttttgccttttctgccatcttcccgacgatttcttcgatcgtatgaatcctcatcatactcctcgtcgtcataggattcgtccggatcatcatagtcctcaccgtcataatcccgattctgaactcttgcgatctcctgcgtatccatgaccacagtctcatccacattgttcacttttggtccgtttgaaataaatcctccctgcggatctaccaatgcccgtttcagatcaagcaaaagttcttcgcagttctgataccgatacataggactcttctgtgtacattttaaaataatcttctccaggctctttggcgtatccggcacttccacaattggagaaatgatttcctcctgcaagtgcttgatcgccacagtgaccgtagactcgccatcaaacggaacatgccctgtcaccatttcatacatactgataccggcagaataaatatcacttttttcatctaccacgccgccccttgcctgctccggcgatgtgtaatgaaccgatcccatcacgctggtgctgatcgtattggacgaagtcgttgctcttgcaattccaaaatctgtaacctttacttttccgtcttttgaaataatgatattctgcggtttgatatcccgatgtatgatatgctggttgtgggctgcctgaattcccgtcaccatctgaatggaaatgctgatcgtctcttttgcagagagtctgccttttttctcgatatattcttttaatgtgatgccttccacaagctccatcaccatataataaactccgcggtcctgccccacatcatatacgttaactacgttcggatgcatcagacctgctgctgcctgggcttcgcttaagaactttttgataaaagtctcatctgagcgaaaatcgctcttcagcaccttgatcgccacataccggttcagcttatgatctttgcccttatacacatccgccataccgccggaaccgatacgatccaggatctcatagcgctttcctaaaaagataccttcttttaacatatactcacctcatctgcgaacggctctaccagtacgatcccgatattatccgtaccgccgttctcttttgccgtttctaccagagactgtgcggattccacaatatctctgcccccctgtacaatatggaacagctcttcatcctccaccatattgctgagtccgtctgtacacatcagaatgatgtctccctttttcagacggtgctcataaaaatcaacctctacgctgtcttttgcaccgattgctctcgtaatgatatttttatccggatgatgctttgcttcctccggcttgatcccgccaaggcgtaccatctcttccaccagagaatgatcttttgtaagctgtacgattccctgattgatcagatacagcctgctgtctcccacgtttgcaaaatacatcatctggttgacgatcgttgccagcactaccgtagtccccatcccctttaaatgaggatcctcggaagcttttttgatgatctctctgttggctgtcttgatcgccgaaacaagcgctctctctacgtcctgctcgctggtattctccagctcgcgttttaaaacttccactgtatacttggaagcataatcacctgcctgatgaccgcccattccgtctgctacaacaaacagattcggaagaggtcccagaggattgtctgtcatatagacatagtcttgattcacttgtcttaccatcccaacatctgtaatggaaaatgtcttcatacgctctctcctttactcattctctgtttttacatagcgtcttctgagctgaccacaggcaccgtcaatatctgcgcccatttctcttcttatagtaacatttattccgcttttttcaagtttatttttgaaattcaacgcatttttgcgggaaggctgctgaaaatcacgctctttgatcggattgaccggaatcagattcaaatgacagttgcgggattttaagattccgatcagttcctctgcatcttcctgtgtgtcattcactccgtgaacaaggctgtattcaaaagtcacccttcttcctgtctcctgaaaataaaaatcacatgctttgagcacttcctgcaagtcatatttatttgccaccggcatgagctgctttctcttttcctgagtagagccgtgcagagaaagtgccagtgtgatctgcagatgctccatggcaagctcgcggatcttcggcacgatcccacaggtggaaaccgtgagatttctctggctgatatgcagtccgtgttcatctgtaagcatacggacaaatgtcaggaaattctcataattatccatgggttctccggttcccatcacaacaacattggagactctttctcctgtgatcttctggatttgataaatctgccccagcatctcagacggcgacagatttctctccagcccaccgatggtagaagcacagaatctgcatcccatccggcaacccacctgagaagaaatgcagacggaatttccgtgcttgtagcgcatcagcacactttccaccacatttccgtcagaaagctgaaataaaaacttattcgttgcgtcaatcttcgaaatctgacgctccagcatttttaccggaaggatctcatattccgcctccagtttttcccggagcgctttggagagattcgtcatctcttcaaaactgtcagcaagctttacatgcagccattcataaatctgctttgcacgaaatttcttttccccgatctgttccatctctgcggccaattgttcatatgtatatgcgcgaatatctttcttcatcctttttctatccttttatttctttccgaatctggcaataaaaaagccgtcacttttatgaattcccggaagcagctgcagacatcctgcttcttccacactatcctgaagagtactgcacagtctgtccgcgatcggatccagtacaaattccggaaattcttttaaaaaccagtgtacattttctatattttctgccggattgatcgtacaggtgctgtagatcagcgttcctcccggccggacataggacgcagcatttttcagaatctccctctgcagtcctgccagctctttggtgccctgttcggttgctttatattttaaatctgtcttttttgcaagaacccctaatccggaacagggcagatctgcaatcacaagatccgccgcatcttttacatccgcatcacagacagtcgcatctttttgtactgcgtgaatattcgtaagaccgcttctctcgatattttccgtgatcaatcctactttatacaggcttagatctctggcttctacacttcctgttccccgcagtttttctgcaacatgaagtgcttttccgcccggtgccgcacagacatcgatcacccgatcccctttctttggatctgcgagttctcccaccagcatggaactgatatcctggacataaaacgctcccttttgaaagctttccagctctgaaagatgatcatagtcctgaatccagaacgcataggacagatatggatgcggcgttaccgtaaccccttccttttgcaggctttctttcagattttccggcgttgtctttgccagattacaccggatcgtcaccggtgtctcttcctggaaggcctgcagcatggattcgatcacatccagatcataagtcttcttccacaattttaaaatccactccggcatggaatacacaacagacagccgttcgatcccctctgcgggatactctacctgatccagacctcgcgccacattgcggagcactccgtttacaaatccacgtagggtgccgaatccttttttcactgccagctttactgcctcgttgcacactgccgaatccggcacgctgtccatatacttcagctgatatacagcacttctcaaaatattgcggataaccggcttcatcttgttgaccttcactttggaaaactgattcaaaatataatccagttcgatcatgtgctccagtgttccttcagtcactctcgtgataaatgcgcgttcctttttctccagatactgatatttttccaggacggcattcaatgcaagatggctgtagacattctgctgtgtcacctccatcaggatcgccagcaccagttctctttctgtcacctgtttagtcatctcttcttcctccgcttatgatcaacagacgaagcagctgcagaatcatagatgcggcacttgacacatacgtcatcgctgccgcccgcagcactgcctttgtctgacttaattcttccggatataacattccggatgtttccaaaatacgaattgcacggctggaggcattaaattctaccggcaatgtcacgatctgaaacagcactgcagccgaaaacagcaaaattccgagattgatcagcagacttgctgtatttccattcatgaataatccgataatgatcagcggccaggctgccatagaaccgaaattcgcaacaggtaccagagcacctctgatctgaagaggcgcataccctttcgcatgctggattgcatgcccgcattcatgcgcagccacaccgatggctgccaccgatgctgagttataggttgcatcagaaagccccagcgtcttatttgccggattataatgatctgtcagattgcccggaatatgatgtactgttacatcataaatcccgtttgcatgcaggattcgctctgctgcatccttccctgtcataccggaccggctccgcacctgtgcatatcttcgataggtactgttgacatgcgccgaagctgccatacatattacggctccgataatcactaatatataagtaggatcatagtaaaaaaacatgctcttcctccaatccttttatttatgaatgaaacaacgttccttcttcgagatgatatcctcttaaaaatgcatctgtcttcattctcttctttcccggaatctgcaattcctgtacgattaaagttccctttcctgtctgcacagaaaaactgtcttttgtcacatctgtaaccgtccctggctgtgccttcgtctgctctttcgagacttttgcactccagatcttcaccactttattctcccagtgtgtatacgcactcggccaggaatttaatccccggatcagtctctcgattgcttctgcggaagcattccaatcgatgtttcccatttttttgttcaacatacttgcataatgtgtaggagtctctccctgtttttgaggaacgatggtgccttcttccagtgcttttaatgtctccacgcaaagtgctgctccggcttttgacaatttatcatgaagactctctcccgtctcttctgccgtgatcggcacttcggtcttaagcagcatgtcacccgtatccagaccttcatccatctgcatggtggtcacacctgtcacatcttctccgtcaatgatcgcccactggatcggtgccgctcctctatatttcggaagcagagacgcatgtacattgacacatccatatggtgtcagttccagaattgctttcggaagaatctgtccgaaagcgaccactacgatcacatctgccttatatcctgccagttcttccacacaggccgcttctcttaccttgatcggctgaaataccgggattccatgagaaagtgccgcctctttcaccggcggaaactgcatctccttgcctcttccttttggcttatccggctgcgtcactgccagacacacctcatgcccggcttcaatcagcgcttccagtgttcccaccgaaaaatccggtgttcccataaaaatcacacgcatctattctacctcctcttccggtggttctacatcatgcagtccgtcctccacacgttctacatacatatgtcctgcaagatgatcgatctcatgacagaatgctcttgcaagaagaccttcgccttccagttccacttcttccatttcttcattgagtgcacgtaccttcacatagtttggtcttgtcacgatcccccatttgcccggcaggcttaagcatccctcttcgcctgtctgctctccggatgtctcaatgatctccgggttgatcagcacgatcgggccttctcccacattgatcacaacgatctgcttcaagactcccacctgaggtgctgccagtcccacaccatatttttcatacatcgtatccagcatatcctcgatcaaaatttttgtgcgcatcgtcatctttgtgaccggtttgcactgtttttccaaaatgtcatctcccatgatcctgacttctctgattgccataatttcactgttcccttctatttattctttgttatcttttaaaaaacatgcatcggattgaaatcaaactgaatccgcatcttgcgatatcccggatttacttcaatatattgttccaatccgttctttatcctcacaagtgtatcataattttcatcttttatgtagattactttgcgatacacatcattaatctttccgattcccggacttgcaggtccgatgatcttcgcagtttctttcggagcaatccggatcgaaaactcttttaaatacttacaccctgtctctaacagcacctcatcctcacagcttaccagaactgcaagcagattttctaccgggggatatcccatgatctgccgataccggatctcctcctcataaaacgcctcataatcctgtgctgcggcggttacgatactgtaatgcgtgggagtgtaggtctggatcacagcttctccttctttctgcccccgtccggctcgccctgccgcctgtgtcaaaagctggaaggtgcgctccccggaacgataatcatctgaatacaacgacatatctgccgccagcacaccaactaacgtaacattcggaaaatcgtgtccttttacgatcatctgcgttccgaccagtacatctgcttctccattcgcaaatgcagacaagattttttcatggccgtctttctgtcttgttgtgtccatgtccatacgaagaactcttgcctgcggaaactgtgcttttacaatgtcttcgatctgctgtgttcctgcccgaaattctccgatatgtctggagccgcactccgggcagacaggtgtccttggttcttcatatccgcagtaatgacagaccatctttccgtttctgtgatacgacagcgaaacatcgcagtgcggacactttaccacatggccgcactctctgcaggaaagaaaccctgcataccctctcctgtttaaaaacaacatgatctgttcttgtttttccagccggtcttccatcaactcctgcagatgccggcttaagatcgaacggttgccttcttttaactcctgcctgagatccgctacatagacgctcgccatcttttgcattcccgaacggttcttcaattccagcaggcggtactccccgttttttgcgcgatacattgcttccagagacggggttgccgagccaagtactacgctggcatgttccagatttgcccgctctatggcagtctctctggcatgatatcttggtatctgttcacttttataagttgtttcatgttcctcatcaataacgatcagccccagctccggaaatggtgtaaacaaggcggaccgcgggccgatcatcacgtcgatctctcccgcttttgcccgcatcaactgatcataacgctctccggcagacattctggaatttaagatggatacccgatttccaaaacgccggtaaaaccgcatcactgtctgatacgtcagtgcaatctcaggaatcagtacaatcgcctgttttccctcactgaccacccggcggatcatctcaatataaacttccgtttttccactgccggtcacaccgtacaacaaataagctgcccgcacatctctgctgtactcctgccagaagcactcgatcgcatgctcctgctctgccgtaaacacaagagtttttgctctctgctctttttctttcaccggatttcgaaacacctgctctgattccagaactgccacctgctgttcttccaatgcattgacgacactacgcgtaatattcagttttttcgtaatcagttcgtattcaatgaccggatcctccagaagtgcttccagaagtcttgctctcgccttctgattcttctgctgataataatgcagctgcgcttctgcccgttctttgccaagcagcagacggacatactttttgatcttggcattctctttttgtttgatcggcaataccgtcttgagtgcctggatcatcgttccgccataatgttctttcatccatgccgccagcgcgatcagcttcgcctcgatctctacactgtttctggaaatatcttcgatctccttgactttggaaagatcatagtcgcaagtctctgaaattcctaccacatagcctttcgtctgcctgttgcctttcccaaacggaatcacaacctccattcccacattcagctcttcttttaaccactccggaattcgatattgaaagatccgatccagtttttcatgttttatatctacaataatatctgcaaacaatccatttcccctgcttattttttctgttcctcttccagttctgttaagatctccgcaatcagaacccgctcatccatcggatgcttcacaccttcgatctcctggtaatcttcatgcccttttcctgcaagcacgatcacatccccggtctgcccgtgtgtgatcgcataacggatggcttctttcctgtctatgatttccacatacgctccgtccgtcttttcgattcccactttgatgtcatcgatgatcgcctgcggctcttcaaatctcggattatcggaagtgatgatcgtcagatctgccagacggccggacacttctcccatctcaaagcgtcggtctctggaacggtttccaccgcatccgaacagacataccagacgttttggatgatattcttttaacgtggtcaaaagactctccagactcatggcattgtgtgcatagtcgatcatcagagtgaattcatcagacactttcaccatctcgattctgcccttaaccttcgcctttttcaaagccgcctgaatgtgctctttcggcacatcaaagtgtctgcacactgcaatcgctgtcagtgaattgtaaacactgaatgttcccggtacatcaatctccacatcaaaatccatgactcctgccacatgatatgccacaccgagatatcccggtctggacaccagatttacatcttcagcccgcagatccgcctctttgcagaaaccaaatgtctccactttacatgtagcatttttaaatacatccttaaaataccggtcatctgcattggcaattccaaccctgcactgctggaacagtaagcctttgcatcttttataatcttcaaaatccttgtgttcattcggtccgatatgatcttttccaagatttgtgaaaatcccgatttcaaacggaatccctgctgtccggtgcagcatcagtccctgggatgacacctccatgaccacgctgtcacagccggcttccaccattttggcaaaatactgatgaatggtataagattccggtgttgtattcgctgccgggatcacttcctctccgataatggcctcaatggttccgatcagtcctactttatgtccgactccctccagaatggatttgatcatataggtcgtggtcgtctttccttttgtccctgtaattccaataatgtgcagcttctctgccggatagccgaaataagcggcagaagcaagtgcgagtgcgtaccttgtgtcttccacacggatcacagtcattcccgccggtgcctctacatcctgctgcacgatcacggcttttgctcctttttttgccacatcagctacatactgatgtccgtctgagacagcgccgctgatgcatacaaacacagatccttcttctactttacgggagtcattgatcaatgttgtaatttcgatcttgtcactcccctgtactacttcatattccaaacgttccaataactgttttaaaatcataactgttcctcctgatcaaagagattttcatccctgcatacattctataggataccataaaacattctcagttgcaaaagctgatagaaaaaagagctggaatctgctcacaaccgcagttttcagctctcttgccttttattatttttccgccatatgcacagtcagctgattgaacggtatctcaataccttcttcatcaaatatcagcttgatttcttccagaagtctccatcttgtactccagtactcctctgtcttcacccatgcgcgcagtcccagtataacagaactgtcagccagagaatccacaaacaccttgatatcctcgtcctgaataatggaatcatcctgttttaacagcgtttcgatcagatcttttgcttttttcagatctgcatcataggcgatccctacttttaaatccaactgccgttccggtcttgccgtaacattcgtcagactgctgttggaaagcgttccatttggaatcacgatcgtcttattatctaccgttgtcagctttgtatagaagatctggatgacttttaccgttccttctgttccatcattggcaacaatgatgtagtcacctactacaaacggtttcaaaagcaggatcagtacgcctcccgcaaagttcgaaagactcccctgcagtgcgagaccgattgccacacctccggatgcgatcaatgccgcaattgaagaggtctcaatcccaaagtttgttgcgatcataaacaaaagtagtgcatacagcccaaatttcaggaacgattctacgaactgaatcactcctgtatccgcattggcccgctgcatggaatgcttcaccatcttctggattccgtgaatcacagctcttccgataaagaaaaatacgattgcaagcacaaccttgattccgaaagagatcaaggttgggatctgattctcaaaccactgtacaaactggtttacatcttttgccacttcttccggggactgtactacatcctggatttcctctgttgctaaaaatatcactcttacacctcctgatttaatgccagaaacgcacagagatttcctctggcatctcctgcctgtctgtgagaatacagaatctcactgttacaatgcgtacacagattggtcactgcaatatgctccggcaaaatccctgcctcataaaagatcagttcattggctttccacagattcagctggtacttctgattttctttttgataaaacaacgcattccagcagtcttccggaaaatttttctgaaactgccggatcacatcttcactgacctcatagcagtcctgacagattgacggtccgaccgctgcgagaatatcctccggtctgcttttaaattctctgcacatcgtttccacagtcacctttccgatcttccctatggttcctctccatccggaatgactcagtccgatcactttctttaccggatccacaaaatacaaaggaacgcagtccgcataaaatgttaccagacaaattcccggaatgtcagtcaccagaccatctacatccgagtaggtcctaggttttacgatcccgcagcctttgtctgcttctgtcactacccgcacattggtcgtatgtgtctggtgagtaaacaccatatcctcacatcggattcccatcgctgatccgatccttcggaaattttcacgaacagcctcttcttcatcccctcttgtgaaacttaaattcaatgaagaaaagcagcctttgctgacgcctcctatccttgtagaaaatccatgctttacaatccctgtctctcgaaacatcggatattccaggtatggtggttctgtatattgttcctgaaaaatctgttcttcattcttataacgaagtcctaatcccattttttccactcccctttttatattctatgccccctcaaaggcattttcaatgtgacacacctcgttcccctctattgcaactacatcaaaccttgccgcagcatcgggtattttatgtgccgccacatattgctgagcgcatcggtacaatcgtttctgcttttttgtatccactgcttccagcgcactgcccgcactttttgttcgccggtatttcacttcacagaataccaaatactccctgtccctggcaatcagatcgatctcccctgcccgacacctgtagttatactccaggatctgaaatcccttcttttctaaaaatctgccggcaatctgctcataggcagtgccgacagctctgttgttttgtttcatccttttcacactgcgcccggaaaacaccacatttttcagacaaaatttttaataaaggtacggcggtgaatcggcgtcggtccaagtttccgaagtgctgcgatatgcgctgccgagccatatcccttattgtcagcaaacccgtatcccgcaagtacctgatcatactcttccatcagacggtctcttgttactttcgcaattacacttgcggccgcaattgaaacactttttgcatctcctttgatgatcggcacctgtggaatcacaacctccgggatcgtgactgcatcatttaaaagaacctccggttctacagacagctgaccgattgcctgacgcatcgcttcataggttgcctgaagaatattgatctcatcaattcgcgccggtcccgccattccgatcccaattgcaattgctttttcctgtatctcatcatacagctcttctcttcgctttgccgagagctttttggaatcattcaaatatagaatctcggcgtctttcgggagaattaccgccgctgccacaaccggacctgccagtggtcctcttccaacctcatcaattccgcagatatagtcacaatgactatacttttcttcatacggccgcatctgctttaaacgaagtctttcatttgcaagcttttcgtcctgcttctgatatttctgaatgagcttttgcactcccatccttgtatcatacgcatacatctcatacaattctgctcttgaaccccggcacgcttcaaactctgttctgatctcactgatacttttcatttcttttcctcaatctacttcctcttaatcgtgccggataaacccaatgtcactaaacggccagatcctcacccaggctcgcccgatcagatccttcctgtgcagcacgcctacactcggatccctgctgtcagaactgtgatttcgattgtcacccagaacaaaatattcatcgtctcccagtgtgatcgattctgctgcaatccccggatccagcatcacttcttttccataatgttcatccgccagcagttctccattgatatagacctctccgtctataatctggacagtttctcccggcagtccgatgatccgtttgatataatatgtattttccttatattgataagggaatacgataatctcataccgctcaggttccctgaaacgataactgatcttgtctacgatcagattgtctccatgttgcagtgtcggttccatagaatgtccgctgacttctgtccgctgtcccacatacgtaatcagaacatataccgcagccagcaaaatcgcaatatacacgagccatcctaaaatttctttgaaaatacttctatcctgatctttctctttcatgctacgactgccccctctttactctccgtctgtctcttcataatcctgagggaattccagagtaattcttccaattcttccatttctaaaatcatctaacaacagtcttgccgccttttccatatccagctcactgcctcgtaccagacaatgcctgttcttcgcaatttcttccagacacgcataaatatcctgtgactcactcacatcatatttttcctgcaatacacccggataactctgtaccagaaaccggatcagctcgcctcccagctcttctgtattgagaatctcatctttaatagaaccgataaatgccagccgaagtcccacggtctggtcttcaaacttcggccagagaatacccggcgtatctaaaagttctacatttttatttaaacggatccactgttttccttttgtcactcccggcttattcccggtcttggcacaggcttttcctgccagtgcattgataaacgttgattttcctacattcggaatcccaacgaccattgcacgcaccgggcggtttaagatcccgcgctttctgtctctttctatcttctctttacaggcttcctgaatcacgccctgaatcgacttgatccccccgcctctctttgaattgaccttgactacagaatatcctttcttcttaaaatactctgcccatgcatcattccacttttcttctgccagatcggctttatttaaaagaatgagacgtgctttattttttccgagctcatcaatgtccggattccggctgctgaccggcagccttgcatccaccagttcgatcaccagatcgatcagtttgatattctcctgcatcatccgttttgcctttgtcatatgtcccggataccactgaaaatgcatattgtccctcctcactattttacaaatccaaaattactgcccacactcgtattaaaccatatcttcccgtaaatttccgaacgttttacatttccgatatcagccatcctgctgtcatcgctgctggacgcctgatctcccagtacaaaatactcattctcaccaagtgtgatctcatcctgggcaactcccggcttttcaatttcggacacaaagatatcttttttctgttcttttccgttaatatatacttttccatccttgatctgaaccgtctctcccggcagtcccacgatccttttgatataataatgtgcattttctctgccatttggcttaaacgcaataatatctcctcttttcggagtcatggcattatacgccagacggttcaccagaacaacatctccgttttttaattccggccgcatcgaatcgcctgcattgctcactcgctgtccaaaataaaataccagtataaatgcaagtgcacagacgactgcaatctctgcgatccagagcgcaaccgcttttttgttccaatggatcttttcactcagaaaatgcagttttgccttgtgtggcgctctttttcgcttttttcgaaactttaagtgccgcatacattctccttataacagaaaagggacaatctacacttctgtaattgtccctctcatcattcctactattttactaattctttaaccttagctgctttaccgatacgtgatcttaagtagttcagttttgctcttcttactttacctctgcgaacaacttccactttctcaacgtgtggagagtggattggccatgttttttcaacaccgattccgttagagaattttcttactgtgaaagtagctcttactccgccaccctgttttttcagaactgttccttcgaaaacctggattctttcacggttaccctctttaatcttagcgtatacttttacagtatcaccaacgttaaactcaggtgcattttctttcatctgctcagcttcgatttttctgataatttcgttcattgtgttcctccttcatcttggacgttcttaataccacttcggtaccagaggaccatctcttcttttcacaactgttttattctatcatattttgtaaatagtttcaagcattttcctcatcttttgccaaaagttcctgcaaaaacttcatttctttcttatccagaactccgcttttcatgcacttttccaaaagatccggtcttctctcctttgtccggatgatcgactgctctcttctccacttttcaatattggcgtgatgtccggacagaagaatcggcggaacttttttcccatgccattcctcgggtctcgaatactgcggatattccagcagatcatcctgaaaagattcaaattctgcggatacatcattgtgcagcacacccggaatcaaacgggaaatcgcatccaccatgaccatggccggcaattctccgcctgtgagcacataatctccgatagaaacataatctgtcacaatttcctccagaacacgttcatcgattccttcatagtgcccgcagagcagcaccagttcttcttcttttgccagttcttctgccatagtctgggaaaaagtcgctccctgtggagaaagatacacgacacgcggcttctttttcactttttctgcgatcgcctcatatgcctgataaacaggttctgcctgcatcagcatacctgctccgcctccatatggataatcatccacgctttgatgtttgttaaacgcgtaatcccggatattgaccgcctcaatggaaagcagcccgttgtttaccgctcttccgatgatactggtacccagtccctgcatgaccatgtccggaaataatgtcaaaatatgaaaattcatcgtatctgtcctgcactttctttcattgaaatcattgatccagcaatccgttcagcagatgcacctgcattttctgcgcttttacatccacggaaagaatacactggcggattgccgggatcagcacttccccatgtgtttttgactctacaagatacacttcattcgccccggtttcgatcacatcttttaatgtcccgaaaagttcctcgggattctcatccgtgtaaacttccatcccgatcagatcagcaataaaatattcgtcttcctccagtgcaactgcatcctcacggctgacaaaaagagaacagcctttgtactgttcgatatcattgatgttgtcaatccctttgaatttcacgatgacaaactgtttaaaaaatttcactccctggacttccagcgaaagcttctctttctttgtctccagaatcacttttttgagctttttaaacctgtttggatcatccgtggtcggaaatactttgacttccccgcggattccatgtgtggatgagatcacacctacctgtaaaaactgttccatgctcttctcctatcctctctgcgaaaaagaaagggggcagctgctttgatccaaagcctgtcccctttttgtcaagttactgtatgatatcaacaacaactttcttatcttcctttgccgctgctgcttttacaacagaacggatcgcttttgcaatgcgcccctgttttccgatcacttttcccatgtcactgtcagcgacacgtacttcaataaccgtagttctgccgtcctgtctctcagaaactgcaacgctgtccggatcgtctactaatgctttcgcaatcacttcaactaactctttcatttacgcgcacctccgcgaaacagcttatttttcgattccagctgccttaaagatctttcctacaacttctgtaggctgagctccgttgttcagccattttttagctgcttcttcatctactttgaatacgcttgggttctgatttggatcgtatgttccgatctcctcaatgaactttccatctcttggtgctctcgcatccgctacaacgattctatagaaaggagctttcttctgtcccattctttttaatctgatttttactgccatttctttcacctcttcttaatatttttcttttttgttatctatgtgctaaaaaggaagcttaaatctgccttttttaccacctttacccatcagtcccggaagtcgcttcatcagttttctggattcgttaaactgctttaccatacggttgacttcggaaatatctacaccagcgcctcttgcaatacggtgttttctggatggattcaaaagatccgggttctgtctttcctctactgtcattgactggatcatggcctccatccttgccatcttcttttcattttcttcggagtcaagttccggcatctttgcccccatgcctccgagtcccggcatcataccgagaacactggataatccgcccattttcttcatctggttcatactttccagataatcttcaaaatcaaactgggcttttttcatcttctctgccatctgctgtgctttctcttcatccagctcagccccggctttctcaatcagtgtcagaacatctcccattccaagaatacgggatgccattcgatccggatagaactgctccagatctgagagcttctctcccatacccacataaagaatcgggcatccggtcactgccttgatcgaaagtgcagcaccgcctcttgtatcgccgtccagctttgtcacgatcacaccgtcaatcccaatcttatcattgaaacttccggccacattgaccgcatcctgtccggtcatcgcatccacaactaaaatcgtctgatgcacatccactgttcctttgatctcctgaagctctgccatcatatcttcatcaatgtgaagacgtcccgctgtatccaggatcacgatgttatttccattcttgcgcgcatgctcaagcgccgcttttgcgatatcagcaggcttgtttttatctcccatggagaatacttccacgccctgcttctctccgttgatctgcagctgtttaatcgctgccggacgatacacatcacacgcaacaagcagtggtttcttgcctttcagcttgtacttgcctgccagctttgcagtagtcgtggtcttacctgcaccctgaagtcctgccatcatgatcaccgtgattgcacttcccggctgcaatttgatctccgtcgtctcagaacccatcagatttacaagttcttcatttacgatcttgatcaccatctgtcccggattcagtccgttcatcacatcctgtccgactgctcgctcctgcacatcttttacaaacttctttacgactttaaagtttacatccgcctccagaagtgccatcttcacttctttcagtgccgcctttacatcatcttccgtcagacgacctttgcttcggagattcttaaatacgttttgaagtttttctgttaaactgtcaaatgccatgctataactcctctataattgtatccgatatcttccggatcttctctatcatctcttgcggtttctgatttccggcaccggattcataagcatccagcacactgtcgatctcgtgaaccttctccttgatagaaagaaatttttctaccagatgcagcttctcctcatagccttccagagccttctgacaccgcttgatcaggtcatgcactccctggcggctgatgcctgcctcacctgcaatctcactcaaagataaatcttccagtacaaactgttcataaatctctttctggtgactggtaagaagttcaccgtaaaagtcgtataacaatgcctgttctaaaatatcattcactcaaatcacctttgctatcataactcaaaaaaaaagaggtgtcaagtactttttcttgacaccttctttctttgccattcgcgcttacaaaagctcccctatattaaggagaccccacccggttccttcttcgtccagcgaaatgcaggactccctcagcttcagtttcacttctacattggtcatgtccggatattctgacagcagacatgcaaccgcacctgatacgatcggtgctgccatggatgtgccgcttttctccacataagctttcttttctttgtcaattctgccacagcttatgatcccaagtcccggcgccacaagatccggttttacaatgcacgtatcggatggtcctcttccggaatatttccaccgctgtcccatacgtgtcctgccccgcctgatttcctcataagcgcctactgtgatgatctttctgctgtctcccggtgaagcaatactgcctctttccggaccgtcatttcccgcagacgccaccaccgcaattcctgcatcccatagagattccgcaccgagtatcagtcgttttttctgcctctgttccagattaggctttgctcctacagaaatattgacgacccggatgggatattttttccgcatagacagtacccagcgcattccttccagaacactctccacacttccgtttccatcctgatccagtacctttgcaatcagcaaggaggctttcggcgctattcccgcgtaggttccgccggaaagccgcccgtcgcccgccaaaattccggccacatgtgttccgtgaccgctgtcatcatacatctgctcctttcgatgtacaaaatccctgaattccaatatccgttttccaaaatcaggatgtgcgcagatgccggtatctaaaaccgcgacgcagattccctgccccaaagcactttctctttggatctcttcacaccagtatccaatgatctgctttgcctgtttcatttatgaacattccttttttatcagaatattcacttcttctgccggatgtgtttataccatgatgtgtgcctttcctcccgcagtcttcccattcatacgcaggtcttatcgtacactttctcgcaaaagaactgtactgctccatattgtagcttgccggcagaaaacctgcatgtactgtggaatcaactgttcacactcacggatgcgtccgctttgtacatattctctgatctgtctgcaaaactgctccagttctctattctgttctttctctatttttttatccatttttatgatcttcataacccatcttctccttcccttttctaaaaaatagtacaggccaagtaaaataagtattaagaccaattcaactcctgtaaaaaatttattaaaacaattttctcacacatttcccctatccacatattatagaactgtaaacaacattattggaggatttaaaatgagtgaattaagtgcaacaaactgcggatgtggatgcgaatcaaactttggcgggaactcctgtatctggatcattctcctgcttctgtgctgtggcggatgtggcaatggatggagcaacggtaacggatgcggcaatgacagctgtctgtggatcatccttcttctgatcttctgcggaggatgcggcaatggattcggaaacaacggatgtggatgcagcaataacggatgcggatgctaatctgcctttgaacgcaaaactccccggcaatctgccggggaatttttaatgcccggctttttccgaccggatcttttctctgtctttcttttccttctctttgtccaacctgtttttcaacatgcagttttcatcaatctcgtataccgcatttccgtcaatgatcagttttcgtttcataaaaatcctcttttcttttttcttcctttctttatagtatgataccaactaaaaaaagtcattcaggttttcattcattttcgtgtacttttccacatatatatttacaacgctacataccgggaggatttatggaaaagaatccaaaacactttctgacaccttttgatgaactgactacttccagacaattacagacgatcaaacttttgctgccctatcttccaacaaacggccaacggatgctggggatcttcatccgcctgaatgaattgcagaatgccattcatctctttcggggatttccggtttcccctccttctgactctctttctccatcccggattttaagtgacctctcaccctatctttccgaagaagaatcacagcagatggcgcaggtaaaccagcttctgcagatgatggagctttttcagaatatgccggcagataatcctgccggtttttctcctgatctgctgatgggaatgttgaatccggaacaaaaagaaatgtttcagacatatgatgccatgttttccgatacaatgaatcaaatggattttacaacttctaaaggaggtacttcacatgaacgaatggatgaatcatccaaaaatgcagaacatggatccaatcaaactggaactgattaaaatggccgctgcacaaactgccggaaaatccggaaaagacctcgcgcccatcttgttcgcactgatcaccaatgcgggaaagcataatattcagttctcgccggaagaaatcactctgattctggatcttctgaaagaaggaaaatcagatgccgaaaaagcacagatcgaccgcaccgtcaatatggctgcgtccatgttaaagaagaaggcataaaaccttcttcttttcatttcattgcattctgtctcgtcttcctgtacaatattgaactagaatcaaatattcaggaggatttctatgcagactctcatgcttacagttgaatatgacggcacccggtatgcaggctggaaggccgctcccaaaaaagaaaatcttgatacggtcttggggagaatccatactgctcttgccaggctgctcaaagaggacatacagttattctgtgccgcaaaaacagaccctggtgttcatgcaagagggcagattctcagctttcagaccacttcttccctgttgccttctgctctaaagagcagtctgaatcaggtgctgcctcaggatatcgccgttttagatgccagacaggtttccgaacgttttcatgcagaattactccccaaacactgtatctgggagctttgtatcaaaaccggttcgactcctgatgttttccgtcagaagtatactttatttctccccgacttgccggatcccctgcgaatgcaggaagcattttcttttttgaaaggcaggcatgatgtccgttgcttttctcctgtcaaaaagaaaaaagcaatcatgagagaactctattctctccggattgagcattccgatgacgaaatgcagcttttcctggaaggcagtgattttctgccattcatgcccgcaacactcatgcagctgctgcttgatatcggaacgggcacactggatgcctgctgtattccttcgatctttgcaggagaacattcttattccgggcatgctcctgcccatgcactgtatcttcatgatattgtttatatttcagatagaaaggatgatttttaatgtcgatttactatagtatcctctacttttttgtatatggctttctgggatggtgtacagaagtcatatttgcagcttttaaacagcatcgttttgtaaaccgcggatttttaaacggaccgatctgcccgatctacggggttggcgttacactggtcatcgcatgcctggaagctttccagtccaacctgttacttttgtacatttcttctgtcatactggtaactgttttagagggcgtaaccggatgggcaatggacaagctgttccacaacaaatggtgggattattccaaactgcctttcaatatcggagggtatgtctgccttttattttccttgatctggggcgttgcatgcgttttcatcgtatattttgtccacccgctgatccatcaggtgttatccctgattccgcacacagccggaattgctttgatcgcaatccttggcattgctctgctttccgatatgatcgtaaccacttctgcaatcgtgaagttcaatcaatatctggaactgctgaagcatatcaccgacgaattacacgcaatttccaatcagatcggagcagagctttatcagaatgtaatgcacgtactggatatgcaggaaagttccagacaaaaactggatgatgtcaaactggaagtatccgaagaaatccggatgcagattgtagaattaaaaacaagagcccagaatctgggagaaaaggttccaaaaccggcacgccgtctcttaaaggcattcccgaaactggaatccagaaattacaaagcacagctggaattgttccggcaaaaactggaacagcaccttggcagacattaatctatcctgataaaaaccacgcagcccatgcgtctccaaacaccatggctgctgtcatacccatacataaaaacgggccgaaggcgaatgctgtcttttgcccgtttcttttttctgccagaagccggatacaataaatccctgccagtaggattgctgccgcacttcccataacgaccagcttcactccgattgccaccccgacagctgcaacaaacttgatatcaccgccaccaaagcttcccggaacaaaaaacaaaaggcatgccatcgggacacttaccgcaaacatccctagtatcctctcctgccaggaaaccgaaggatccaccagtgccagcagtactgccaccagaagaatccctgcattccatctgtccggaatcttatgcgtccgccagtcagaaatggaaatcacgacaaagataaaaatcagtatcgactttaacagcatcgtcatcatgattttcccgtgtagtacaactcgatcggatcaatcggatcaatcggatgttcttcctccattttaaccttccgccctcttcgttttataagctcgccgcctttattataaagccagaatgaatacaccagaactttattcacctttccgatcctgtcctttgttgtcttttcatactgtacgccacccacttcaaaaggaactttcttgtggatcatagagatcagctctgtctcacacgtcacaggctccggcagaatcgtataagcacgtcccacacacccggtcttgtgagaatcacttccaccggtcgtcacctttttatattttgccgccagccttgccgcccctgtatttgatactacagattcacagcagttataagcttcaataaaatcaaaccgtttcatgatttccggcgactgataaaatttctttgtattagcgatactcatatacttttctccgcacggatgtgccggtccaagcacacctccgtttcgatgcaccagatcgatcagcagcgataccggcattccccgcatctctaaaagccgcatcttcacgccttccggcatgatcaccagaatgtgccctgcatctcttgtatcatattcgatcccttttaataccacaaaatcagtgtgaacctttcctttcatgtggtttttccagtatcgatatccgttgtatgtgttatggtctgtgatcaccattccctgaaatcccttctttttaaggagtgtgatgtaatcctccagactcaccttactgtcaatcgatccctctttcacatggcaatgcatatcaattttcatagataagcctcctttttgtctctgcattttacttacgcacaggctttcgtctcttttttctattataccgcgttgccatccctcttacaagaaagtccatcaaaaaaacacactcttcccaatgctttccacattggaaaaagtgcgtctgtgttacttatcttcgtcatcctgatccgaaagatcgatctccacgatttctacatcatcatcctcatcatcccagaactcatccagatcttcatcgaaatcttcatccagatccttatccaaatactcatcttctgtaacaatctcttctgacacgatcagatcttctttcatcacttcttcgtcttcctcatcctcgtcatcgtcttcaaattcatcttcaaattccatttccagctcttctgcatgaggaacagccgctgtatgtacttctttctctgcctgcttttcttctttaaactcttcatccagaagagctctggctttatccacttcattctctgtggaattctgttcgcgaatctccgcagcttttttcagatgcagcttttgacgctttccggattccatcagaaactgtaccagaattccaaggactgccagcaccgcaaatgccagcgtgaccatccaacgctctaattcaactcctgcatgacccagcaaaacagttcccgcctgactgatgcatacagcaccggtcactcctgtaagaagcatcagaaccggaacaaaaagcttaatcgtcaacaacgcaaataccagaccaattccaacacacaccagcagccagatcagattcgccggccggagccagtatatacttagtgctgctccaagtacaaaggcagtcacaaacattcctgcccgcttcaaaattgcaaacacgattgccagaataatccctgccgcaagaccaataatcccgctcagtgtttcatctgacgtaatctgcatcgccacagccgctgctgctcctgttccaatcacaaaaactgtcagaaatgaccagaatcttgccagcttcaatccaaagaaacagctcagaattcccagtaataccgtaattccaagcgaaataagcacaatctctgccagcttgtctgccattccaagccgctctaatgcggtcggcaaaacttccttttcctgcagccatcttcctatttcatttatcatatccattgtacctctcccttattatctgaatctgtcaatagcaacctatattttaccaactttttcagaaagatacaacagaaagatggatgcaaatcttttattttgattcacatccatctttacattgttggctcaatcaccttttctacctctcttcacttattaataagtcctgtttttaagatttactgtcctggcggtctgtaccttcctttcttaagtgattctcattttctcgcttcctcgataaccctgcccctcaaatgaattttacttctctcgtaactttctcgtcattacgataatttcttcattttcaccggttatctttcctcgcttcaaatgagtgtttgtttcatctgttttatttgttgactttatattagcactcttttttaatattgtcaatggtatttttagtttttatatattttattttataattatctgtctttttatctttctttatttattttacagttttattgttttatgtaaaaaccaaaaggccgtataccagtgctttttctgatatacggtctttgtcttaaaaattcttcatcacattctggatcactgtctcccgcagctttccttcctctgtatttcctgcctgatgatctgcaaatcttgcttctacatacagataatctgcaagtctgttcacatactgcatggcttttgcatctgctccgtaattctgtgccactttgcggaatctccgctctgcccttcttgtcacagcccgcgcaatatccagtcttgcggaaagctcacatcctccgtacaaaacaaagtccctggctctcggaaacgcagcttccaactcatcgatctgatcttccagatgcacagtctcttctgcgctcatgcggtaatccagatttctcggatctgccactgctgccatgatcttcatcaatgttctctgaatctctgccagattcgtcttcagatgatcctctgaaagcacttttgcatgtccgatataactattcagttcatcgatcgtcccgatcagctcgatccgatcgtctgctttcgaaacactcatcccatttgcaagagaggtatttccgccatcaccttttttggtatatactttcatttgcacatttcctttcccggaacattttcgctatttaaagggctgttttttaatcgcacgggcactgtttgctcccacttttctgcactgctcttttgtcggagacagatatgcctcgatattacgccctttctcaagcccccgcattttcagacagacggccgttccaaaaatcccgattccggatcccagcatggaatcccgtgccgctttataggaaagcttttccatacattcatccggaaactctgtaatctcataaaacacaccctcttcttccactcctgcacagacttcccgcaaaattgcttcatctgccagatgtgtatatataaagattgaaggtttcttcactatcatcgctgttctcctatatatgaaagtaccagccctgttgcaactgcatttcgcggaccttcctctccccggatatttccacgtccgcacacgatccgaaattctgaaagttcttccatcagcatttccggaatctcaaaatcctccgcagacccgccgactaaaacaacattcgaaatatgtttcagatcctgccctggtgccactttcttcaatgcacgaaatgcattggtcacaaacactttacgttttgcctctcttcgcacctgcacaatcttctccatcgggatatcctgttccagccgaatcattccatcctccgtaagaaggaccactcttccgtaaaacctcggatcaatggactgctccacaaatgtcatctgtccgttttccatccgcatatggaacagactttccactttggcaagcgggtactttttaatctgctctgccatgtgccggtctcccagaccaagctctgtctcgatcagcatggacacaagctctcccgcacctgcctgatgcgtcatagatacctttccatcctcggaaatcaccgctgcatccgtagaaccgccgcccatatccagaattgcaagcggaaggcttgttccgggagtcgtcagggctccgagactggccataaccgcttccacgcctgccaccatcacgtttacacccagttctatccgtaattgttctgcaatcttctgcatcggaagatgcctcgtctttaccatcgccgcgattccgaccgctttctcaagacaggtctctcctgccagggcaccggaaatccgaaccggtgccatcgtatccactgccagaatatcagtaatatgaatctctctcttcgcagtctcatccagattttccattccctgtttgatccttgagaacatattgcccacattggtgtcatgctctccttccatatcgtagatcgtaccggcatccgaaactacctgcatgatcttctcggcaccttcatccagatcaacaactgcgtcctgatctgcatggagacagatttttcctgcgggaagaagattctcccggatattgccgcccggtgtttttaaaacgaccgcacttcgctttccgatcagacttttcgcaatcggcgtgatcatccgcgtctgctctgcatccagtccgagcagcgttgcaatcccgtacgggttggaaagcatacggattgtctgtcccggaagcgccacttcgatcgctgccagaacatcatccggaagcttttgaattcccgccacctcatcaatgatcggcactttttcttccagacgattctccacaagaaccgcctcatctgcctgcaggatcacacctgtgatcgtcagccgcttcctctctctgttgataacttctgcgatctcctcataggatgcggctgcttttgcaaatacaatatacggcgttcccggcacgccttcccggattcgctcaaaatccagcgtttttccgactgcctgccctgcacctgcaggggtagacgggttatgtccgatcatggaagaatctgtaatgatcgtctctgtaagcgtctccattgctgtatctccgataaccggcgcggcttcattcaggcggatcagggaaagcgcttccgtctccatcccaatctttcccatagcttctttcaatgctgcccgtatcccatgaacattggcaatggtccccttcgttcctgtcgtcttacaggaagcactgcttaagaaatggacctgtgctcccccgacttctccgatacagacttctgttgtagaatttccaatatcaactccggcaatatatgtcaaagcagaatccctcttttctcataaacctctgccgcttccattacaaggcgcgcacagttttttgcattgtatttttccaacagctcctgtgccattaaaaccagttccagctttgtggaacgattcggacgaagcttatcgtacatctttaaaatcacatcatccggaacatctaccagttctgcagcacgttcaaaattcttttccatcggatcattgccgttttcttttgccacctgtccctgtgcataaagcatttcttttgaaatcttaatgtcatccggggcaatctggtttctcatcactgcatccagcgtgatctcatccagtttttttcctgtcttggatgcgatctgttctctttcgtgttcacctaacgggtactgcatttatctttcctcccattcaacaattccaacttccggatccagctgctctgtctccgcaatgtgcatcaacgctgccttcacctgatattttggtctggacatcggatcatttgtacatggaatcggcactacctgctcaccctttacatatttggcagcattctgtccgatctgacggtaagtctccagattcatcagaggcgcctgcggaaacaattccagattggaaagcggataaaggtctctctgatggatcacggttgtccctttcgactggatgccgatcccgattccggaaccagaaagctttgccgcttccaatgccataaaacagacatcggatgtatccagtattttgaccactctcgggatcattccttcctcttcaattcccgctttcacatttttcagaacatcttccagtaaaataccgcagatggttcttttaatctctttctggaatgcagctcctactccgatcacaacttcctttggatctgtcccctgcttcgcccgcggataatctctgtaggatgtcttttcttcattgatcctgtcccgccctgccatagaaggcacctcggaagatgtatgtgatccagtctcctgccccatctccgaaagaacggcattggttatctgtttaattaactcttcactaatctgcatgatcctgcctcctatatatcctgtgggttgatgatgtgcgggatcttcttgatctcttcccagcgctctccctgtacccggtatccggttccaggtcccatatagtcattcggtgtattgatgccggacaatacatggaagtctttgtccaaaatcgctgctgtctgcatgtaatctccgaccacacgctgctttaacatactcaacacactctctgccacatccacaaatccagtctctgccagcgcttttacgacatcgattcccgtgatgccgcgttttaatacatcctcagccgccatcagatccgcggtcacatcccgatccagtgtatctttgcttccatgtgcgtaggtaactgcctccacctgcgcatctgtcaccggtgaaagtcccagctgtgtaaacactgcctgcaccgctcttgcagccttgtttctgacatgaatgacttcttcttccgttaccgggcgaagtcctccgtctacctgcatatctctctgtaatacattgtaatcatcaaagtcttcggcatcaaagttcgatcccgcaaacatattgtcatagttcggctctgccgcatagccggagaagataaagtctgttcccggcaagaactgcagcatcgttcttgcagtacggcgcatatcggagttggaaaagctctggtcattggaagatgcacactccagcccaagcagcgctgccacaaggttttccgcgatgacttcccggataccggacggtacggaacctgtcactccgatacaacttacagatccattctggattccctgacttccagctccctttgtcgcatacagacagcggcactccagatacagcatagatttcttttcactgcttcccatcagcacctcggaaccggatcctgatgtaaagcggaccttcagtcctctggaagcatacgccgaattcaaaaatgctttggaatatggtgtatcatccccatcgataaacaccttttccgttccatatacagagagtgtctctgcataagtcgtcagtccgcggattcccagctccagctctgttgcttcctctgcggagcactgtgtcagcacacccggacgccccacctgagaaccaatcagaagcgccatggcactcagcggtgcatatctggcaactcccatagtcgtctcttcctccgcaaatccacgaagagctccctctgccgcgtccgctgcaatctgtaccggatcatctttcagatttgtgatgtgcgcctgatttcccggtgttcttctcgcacggatcttctgcattcccatcatcagctctacgacattcagatgattcataacctctgtcatctttgcaggcgtgattcctgtcacaagctccagaatctcttttctggacacatgaatatccacgatcatgcgcgcgatctccagtgaagatactgccatggacgcttctgcacgctctacgttcatcgcataatcagcgataaactgatcgataaaatcaaagtcctctctctttttcccatccagttccacaattctgccgtttgctactttcacagacggctttggatcatacggacttgtcattgccacaaatcccatttccggccattcattgatatatccgtcaagatttaccgggcgctgatccagtgtctcaattcgttttgatcttctcatgttcgttctcctaaatatgatatctcctacacactatagttgtattataccttaaatccaaaagaatcgcaatccggatcgtggtgaaattgtgcacaaatccacattattttcaaaagaaatcaacaaaaaccctcgcatttttcttcttttttctctgtgatttctattttttgatgctttgtctgcattctcccattgacttccattttttcggactgtaaaatagatctatctttttaaataagaacaaaaacttatacagcttacctacgaaaggagtttggcatatggaacacttaaccatcccacaggggtatgtttctcccctgacaatccgcgagactgaggtggcgatcaaagagatcaaggattattttgaacgctcccttgcaaaatcactgcatcttacccgtgtatctgcacctttatttgtaaaaccggaatccggtctgaatgataatttaaatggtgtggagcgcccggtttcgttcgggatcaaggagcaggaggacactcccgcggagatcgtgcattctctggcaaaatggaaacgctatgcactcaagcactacggttttcattccggtgaaggtctttacaccgatatgagtgccatccgcagagatgaggatacggacaatattcactctatctacgtagatcagtgggactgggaaaaagtgatttccaaagaagagcgaaacatggagacactgcagtatacagtccgcaaggtctacagtgcactcaaagaaacagaagattatatttccagacggtataactatatcgagccgctgcttccggacgatatcttttttatcacatcccaggagcttgaagacctgtatccaggatgtgacgccaaggaaagagagcaccggcttgccaaagaaaagggagcgatctttgtggcacagattggaaaagttctcgcttcaggtgaaaagcatgacggacgcgccccggactatgatgactgggaattaaacggtgatatcatcgtctactaccctgtactggacattgccctggagctttcctctatgggaatccgcgtggatgaagaagcgcttgcaaagcagttaaagctttccggatgcgaggaccgcgcaaagcttccgttccagaagtctctgctgaacagggaactgccttacacgatcggcggcggaatcggacagtcccgtatctgtatgtattatttgcgcaaggcacatatcggagaggtacagtcctccctctggccggatgacatttacaactgcgcactggaacacggaatccagttattataaaagaaaaacaggagtctgctgattttgaatcgatcaacagactcctgcccttctttatttcttttttactgccacagcctgcatatgctgtgctttgtatctgtcttctacaatctctttcggatagcggatcactccattgttctcatacggatcattgaaataatatccttcttcatcatatccgaccaaaagcatacagtgctcattggaaatccaggtgaatacttccccgctgtcttttaatttccactgtgggcccgtgatcggttctctcatattgatacacgcccagagaatcaccggcattcctttgtcaatgtactctgtttgtaaagtttttatctctgttcccgtaagatccagcacctcatacatttcaccgatcgcttttttcagcgcctgagtgatcaccggtgcatagcagccaaatgactcctcatcatagggacttccacaaaaatattttgtgggatccggaccgtaaagctccccctcacgaagttcaaactcctgcctgtccagatattgctcaataaattcatccacagacatttcgtatcccagatacctaagcagcatcacagccgacacactctcgcatccggtcggataacgcacactttgatccagatacggcacatcaattacattacgcatgctgttcctccgcatcctttttctgctctcgtctcttcaaaaccgtcagtactgcaaacaagatcaaaagactgctgcccagtgcagcccaccagatcttcacgattcctgcgatcagatatcctacgatacaaactgccgccacgaccatggcatactgcatctgagtggatacatgattgatgtgattgctctgtgcacccgcagaagacattactgttgtatctgagattggagaaatgtgatctccgcatactgctcctgccagaactgccgccacagagatgatcatcatttccagatttttctgtcccgggaacatcgctactacgatcggcaccaggatcgcaaaggttccccatgaggttcctgttgaaaatgcaagaaaaatcgcgatcataaacatcaccgcaggcaggatcacgcttgccgaagcatttgttcccaccagattctctacaaatactccaattccaagggcatctcccattccttttaaggaccatgcaaaaatcaggatcgccaccgccgggatcatcagtttaaagccttctacgaagctgtccataaatcccttaaatgtaatgacctttctcggcagatataaaatcaacataaataaaatcgtaacagaagttgcaaaaatcagacttgtctctgcatcacatccggaaaaggcagtgaatacatcggttgctccgcccagatatccggtgtagatcatagccccgatcgcagacaggatcagaaccgctaccggcaggatcagatccatcactttccctttttctgatgcattttctgtctcaactgtctcaaattcttccgcaccgcttgtgaagagatccccgtttgcagcattcttttcatgacgcttcatctgtccgaaatcaaatcctgtgatcaccacaaacaataccattgccagtgtcagaagcgcatacagattgtagggaatcgttcttaaaaacagctgaaaccctgtaatccccgcatcgtccggcacataagagttgaccgcagccgcccagcttgaaatcggcgcgatgatgcagaccggagctgccgtggaatcaatgatatacgccagcttcgctctggaaactttatagcggtctgtcaccggacgcatcacggaaccgaccgtcagacagttgaaataatcatctacaaaaatcagcaccccaagtcccgttgttgcaagaagcgcgctttttttgctcctgatcttgcttcctgcccagtttccataggcggcagaacctcctgattttgccatcaacacgatgatcatccccagaagcacgtcaaagataagaatattcagattcatgctttctttcataatttcaaaaaatgacacaaaagaatcccagggagaaaatcctgtatacagcagtgcccccacagcaactcctacaaacagggagctgtacacttcctttgtgagaaacgcaagcacgattgcaagcaacggtggcacaagtgaccaccaagttccgataaacatagaaccatccattttttctttcatcctcttttctattacttttccacatgataataccctgtcctggctccggcacttgccttgtcataacagggtatcctttcttattttactggatgatgcataaatatgcaattataattttttattcgttcctgttccatgcaaatgcatggttcatcggcccacttccggctcccagatccagcttgaactccaatgcatctgaaagatactgctttgctctttttacagactcttccagttcaaattctttcgccagattggctgcgatcgcactcgaaagcgtgcatcctgttccgtgagtattcggattctctattctcgttccgtaaaaccaccgcatcgttccgtcttctttccacaaaaggtcattggcatcctgtctttgatgacctccctttaacagcacactgcatccaaactgtctgccgatcatttctgctgccctctccatatctctttgtgtctgaatttcaattccggacaaaagctcagcctccgggatattgggcgtgatcacctcagcaattttaaaaagcttctcctgcatcgcgcagattgcatcctcccggatcagccttgctccgcttgtcgccaccataaccggatccacgacaatatgtgctgcctcgtattgcctcaatgatcctgctatcacctcaatcaattctgtggacgataccatcccgatcttcaccgcgtccggtctgatatctgtaaaaatgcaatccagctgttcttttaaaaattgcggagacaattccagaatatcacgtactccggttgtattctgtgccgtcagcgccgtgatcgcactcatcgcatagactccgtttgtcgtcattgtcttgatgtccgcctggattccggcaccgccgctgcagtcgcttcccgcgatcgtcagtcctgtcttcatcgatgtcatgtgttacttacatccttcctgttatcatttctgtcagttgttcatcgaaagacttcagataaatatccgctgtctctctgattttttcctgttccttgtttgctttgtcatagacagctgctgtagaaaaccctgccttttttgcagtctcaatggcatagagtgcatcttccacaaccagcgcttcatccggcctgcaattcatctttctcgccgcttccagataaatgtccggcctgtcttttcctgcaccaacctcgctgcagaataacagctccgtaaaatactgccggatctccagccgctcacacgcctgtcggatacagtcttgatctcctgaggtcgccaggatcatggggtatcctttttgtttgaattctgccagaagctcttttgcccccggttttaatgtcacttctcttctgtaaaaggtttcaatctggcagtggattccctccagaacatctgccacaccaaccggcaggtggtagcgatcgatcagatactttgctccctgctccagactcatctcaaacagaatctctcccagatttggttccggctcgattcccagtgtctccagataatgatccggagcatgctcccagatttccatggaatccaacagtgttccgtccgcatcccagatgatccccttgatcgtcattggatcgcctctactttctttttcaattcttctgctgccagcttcgggaaatcctgcgcaaagatcgcactgattactgcaatcccgtcgattcccgttcctgcaagctgactgacattttctgcgctgattccgccgattgctacgaccggaatctgcactgccacacaaatgtcacgaagtgtggcgtgttccacttccaccgcatctgctttggagctggtcggaaatactgctcccactcccaggtaatctgctccatctttttctgcctttatagcctgctccacagtctgtgcagacacaccaatgatcttgtcctctcctaaaatctcccgcaccttccacgcgggcatatcatcctgccccacatgtacaccgtcagctcctactgtacgggcgatttctacattgtcgttgatcacaaacggaactctgtatgcggcacacaactttttcatctcctctgcctcctgcagaaagttttctgtattcagatctttttccctcagctgcaggaatgtcaccccgccttttaaggcctcctctacctggtgatacagcgtgtcgtttttcgtccagcttctgtccgtcactgcatataaaagcagagattccttatcgcacctcatagtttgctctcctttccagttcttctccggtcagattgcagaccgcatcaatgatccggtttctgtaggtggaattgccgtctcccggctgcatattttcccagccgatctcacctgctgttcccatgatacaaacagccgctgccgccgcatccagcatttcttccggattcgcacacaaaaatgcagtcagcatcccggagagctgacatccggttcctgtaatctgtcccatttcttttctgccgtttcggatcacataacaacgtttgtcatctgccaccagatcgatcgcacctgttactgccacgatgcatccacaggattttgcaaacgcttttacaaatgccactgcctcctctaaagtctcttccgtaacaatatccgtctcacaggcatccactcctcttgcaccgcccatgccgccggagagaactttgatctctgacatatttccacggattacagaaaagcggacttcctgcatcagtttcactgctgtctgtgtgcgaagagtgctcgcaccggctccaaccggatccagaagcacaggatgtcccagttcgtttgccttctttcctgccaggaacatactttcaatactgctcttgtgaagcgttccgatattgatgttcaacccctgacagatggttgtgatttcctgcacttcctccggctcatccgccatgatcgggctggcaccacatgccaggatgatattcgccacatcatttacggtcacgtaattcgtgatattatgtaccaatgggcaatgatttctcacagtttccagatattttttcataaatgtctcctttcagacctgaagttgttttttggaatctgctgccttatcgcacaacaaagcgggtacaccaatgtatggcatacccgctgtctcagcttttctatccctacgttggcattatccaaatcaggtcacaggtcgaagcgattcagcttcctctcagcctgcttgatacgcaagctcccttgttttttatttacatttattatactccgtttttcccccattgcaatccttattttctttacaatttgatctggatctggtattttttcatccagtaattgatctgcagcacatatgcgatcatctgaggtcctgccatcagctgtccgtaccacggttttccgtaatccttcggcgaatttaaaaaccgctctgccttctttcgatccagaaatgcccgaatgggcgcacttgtatcctgtaacacttcttctctcagccggtctgccagaagtgcttcgtactgcggattgtatgttttcggatatggacttttctttctccagagtacttcatccggtacttttccttttcccgcacggcgaaacaatgctttgggaataccatcctcacatttcacagaccatggcacattccatacatactcgatgatgcggtaatccgctattggcactcgcgccgacaatccataccaggtactggtcctctccatccggtctaacagtgttgccataaaccatttcaaattcagatacgcaatctctctgcgacgcttctccacaggagaatcctcggtacagcacggtgtttcccgtacagctttctcataggcttcctctgcatactctttcatcggaagcttccgaatccacttttcctgaagcagactctgccggacagactgatctgctgaccacggaaatccgtctgtctcaaaggcttcttttttatgaaaccacgggtatcctccgaaaatctcatccgcacattctcctgtcagagctgccttgctgtactgtgacacctgagagcagaaatacagcatagaggactccacatccgccatacacggcagacaccttgcatccacagctttgtaaagatattccgccagcttttcattgctgcactccaaatagcgatgctcactgccgcaatatgttaccatctgctccacccacggccggtcctgactcggctgaaatgcatttgcctgaaaatactgccggtttccctcaaaatcaaaggaaaatgtctgaagcctttcccccttttcccgcagagcatccgcacagactgccgtcacaaggctgctgtccactccgccggagagaaatgtagagatcgtctcttcactctccatctgccgtttaatcgaatcctccaagagccacgctgttttttctactgtttcttccctggaatcttcatgtggctgactttttacattccagtaacaatgatcttttagaattccgtctgcaaaagaaagataatgtcccggaagcacttcataaatatctcgaaaaacaccgtttccgggagttcttgccggaccaagcgcaaaaatttcacagagaccattctcatccagcacagggtccacacccggatactgaaataagcttccaatggcagaggcaaaaaacagcgtctcctttttctgcgtataaaacattggttttgccccgatcctgtctctgaacaagaacaatatttttttcgtttcatcccagatcaccgcaccgaaaacaccatttatttttttcacaaattccggtccgtactgcatataggcaagcagaaacaattcctcatttctgtctgtgtcggctttcagctcccgcccaagctcttttgcattgtatagttccccattcaaaatgagcgtacacacacgccccggccgttttaatgtaaccggatgtgcatgttctgtttcttccacacagcgtcccggtgcaaatcccatattccggctgcaaaatcctgtaaatgttcccattgtcttccccttttctactgaatgatcggttgatactgtctgccttccagtgccgcctcggccgccgggatcagatactccaggctggcgatcatcgaatttggctttttctgcggattatcctgtttaaacggtacaaaataaacatgcttagtgtttaacaacaacccgatatttttcatattcatacccagtgcatcatttgtagaaatcgaaaccagcagcggacgctcattgcgcagatgcgcttttgcagccatcagcgcaggagtgtccgtaatcccattggccagcttcgcaatgctgtttcccgtacacggcattaaaatcagcagatccaaaaggcctttcggtccgataggctccgcctggaggattgtcagcatcggctctgcccctgtgatttcctttgcctttgtcacaaaatcctctgcatttccaaaacgactgtctatagactgtgccgcatctgaaaaaatggtctgcagctctgcctcttccttttttaatgcccgcagtgcctgaaatactttttcataagtgcaaaaagatcctgtgatcgcaactccgatcttcctgccttttagcttcatgatttacactccctttttatgattctttctatttccttcaaaatctcctctcccagcagtctgcctgatgtacacggcgcaaaacgtcccggcaggcccggcaggacatttatatggattcccagtctgtctgccgcatcccggtcaattcctcccggcatggaagccagctccagaatacagacttcttgtggcactccttccagcaatccctctgtccacacagcagacggcgctgtattaaaaagaaatgctgcttttttcagtacttttgaaagatccttatattcacagatcttcgctcctgcttcttttgcacgttcgcatgcgttctcatcacggtcatacaccacgatcgtacatccccagtttttcaggcactgatgaattgcacttccgcatcggccataccctgtcagaatacacaaactcccccgaagcgtaaccggactgttttgtaccgcttcggcaaccgcaccttctgctgtggcagctgcattttctcttacaatccgttccagctgcatcaggtcatagctctcaccgccgcggcataaaatcctgtttttcagttcttttgaaaaacagccgccaaagatacactgtccatgtttcacatattccatgagctgctctgcatctggtttatattccgctcctgtattgagctttcctttccgcaatacaggcaccggaagcaccacaaaccggcagttctcaaaaatctcccgaagccgctctgttgtttcctcctgtctggtaccatccggaaaaaatgctgtttctgtctgccatccatgctcttccagaaattgttttacataaatctgcctctgatccccgccaataattccgattttttccaatcacacaaaatcctttttcttttaacatatgcacacactttcattgcgtgtctgtatctgagacgcaaaaagaggccagatattaccattttactattttacatattggcaaagcgagtttaaaatagagatgaaaggagaatatgcaaatgaaatctcaaaaacatctgttaagcaaattatttatttctaccctttatctgagtgccttcacttttggcggcggttatgtgatcattacactcatgaaaaagaaatttgtggaccagtatcactggatcgatgatgaggaaatgctggatttgatcgccatcgcgcagtcttctccgggagctatcgcagtcaacggcgcaattgttgtcggctataagctggccggaattccaggagttctgctctgtgtcctcgccaccgttttgccgccttttgtcattatttccatcctttctgtattttacgctgctttccagagcaatgtctggatacggcttcttctggaagggatgcaatccggtgttgcggctgtcatcgcatcagttgtttatgatatgggccgcggaatcatccgtgaaaaaacaccgatttctcttctgatcatgggcggagcatttcttgcaaactatatgtttcagatcaatgccgtctacatcattttattttgtattacacttggctgcctgcagacctggtatcagaaaaggaggacactctcatgatttacctgcagctttttttcagttttcttcaaatcggaacctttagcttcggcggcggttatgctgcactccccctgatccagaatcaggtcgtctctcttcatcattggatctcaatggctgagttcacagatctgatcaccatttcccagatgactcccggaccgatcgccatcaattccgccacctttgtcggaatcaagatcgcaggaatgcccggtgcacttgttgcgactctcggatgtatcctgccctcctgcatcattgtgaccattattgcatatctgtatatgagataccgaaatctggacaccctgcagggaattcttgggatgcttcgtcccgccgtcgttgcactgattgcctctgcaggaatttcgatcctgatcactgctttctttagagattcggggataaagctttcctcatgcaacccaaaggccgtggtaatctttgcaggctgtctgattcttctgagaaaacgagtcaatcctgttctggtcatggtacttgccgggattgtaaatgtgggactctccctttttagatgaatctcagtaaaaagggaaaactcttccgaataaaaagaattttccctccgtcttaaactacaatttcatatttttctacattcactttcgcttttccatcacatgagaacacaatctcatctgcctccatcggtgtgcagattgcagttgtcacaacctgttctccgtcattgacaaacagttcaatggactgtctatccagaataaaacgaagtttcaatgtttcttttccttccgtaactttccatattcttctgcagattacatcttttgtcactccgcaacaagtacgatccacttccataatctgcttttttcgattatatgtataagtagtcgtatattccatgttatgtgccagttccagacaaaattcatcaaattggccattttcgatttctacagtcagatccagcatccttcctctcacttcatcaaactgaacagttcctgaaatctcctggtctttcaaacaacatggatttttacgatactgcttcagttcttccaccggattttgatataatcttccattcatataccgcagttctctcggcagtgtcatcattccctgccacttttgaccatccggaatcacacaggcatcccatgacttcatccaggcgattagaatccgacgtccatccggaagttttgttgtctgcggcgcataaaaatccagaccataatccaatgattttggagcttccttctgaaatgtatgctctgtttcattatattttcctgcaaaatatacggaattatttccattatgaaattcatatttctgcgctttcatgttctgtggcgaacagatcaaaaaatgtgtcccatccagttcaaaaaaatccgggcattcccacatagttccaatctgacctgtgctattttctgccaacacggtctcaaatttccatttctccaaatttttactagaaaaaagtacaacctgacctttctgctctgagttcttatttccaacaatcagataatagttttccccttttttccacactttcggatctctgaaatcaatcttgctacaatccgcaggcagcatatctccggttataacaggattttggggtgatttcacatagatttctccgtctccatacgcaatacactgattctgtcgttcttgaatacttccattctccatctgcacattgctgactccggtatagatgagtacatgttttccatccttttccactgcacttcctgaaaaacatcctcgtttgtcatattcctgatccggagcaagtacggatggcatatttttccaatgaatcatatcatctgaaacactgtgtccccagtgcattggtccccactcagttgtatacggatgatattgataaaaaagatgaatctgtccctgataccaggaaaatccatttggatcattgatccatcccactggagcagctacatgaaatgccggtttttcttctaccggaattttctcttgttctgctttttcatattcattggctttctttaattcaatactcataatgtctcctattctttcccctgttcactcttcaaggattcttgatacttgtcaaaatacttctgcttgattgcaagataatcagacaatccatattgttccattttctttaaatagctgtcccactctttttcaattccgccatttaagatccaatctgcttttttctgttctgcatattttttgatatctgtatcgtattgagtcactttatttgtgtcttcaatgctcataaacacatttggatatacatatttactgtgcatatcttccaaataagtctcatgcatattgtccagacgccattttgcatccgcaggctgtgtcacataaacatcgtaatattcatttaatactgctaacggtccattcactgactgagcttctctgacttctaccggagactcatttccaagatccatatgctttaacattttctctccatccttgttcgttcccatcgcgaaaatattaaaggaatctttttctccatatgttccccaattgttctgtggagattgtaaaggcgcatacatctgatcaatccacgccgctgccagtgctgtgtttttacagctggttgtcagcacgcagcgtcctctgtcaaatccacttgtctcactgttattctgtctggtgatattcaccagaccattcggaccagccaataccggaagcatcacataatcctcataattatcaatattcgagatatcccatgtaaaacacagaccataccggtggctttttcctttcgccacataagtagaccattcctgtgtaaaagcttccggatcaaccaatttctgctctaccagttcatgcagccactgaataccttctttatagccttcctgtacagtggtataaataaccttgccctcatctgtcactgcaaagtgatccccagtgtctccatatccctcaccaaatccattgatcaaaattgcaggatcctgatctccattgttgatgataaaggacatcggtatcacatctccctctatgtcaaattctgactttagttcttccgcatgatcccggaacgcaattaataccttttccagttcctctgttgtttcaggtactttcaatccaagaaaatccagccattttttattgatatacgaaatattcccaatcgcctgaattgcttctttcccttcccccagctgttcgatccaggggaaagaataaatatgtccgtccggggctgtacacattgttctatattccggatatttttcaaaaatagccttcagattcggcatatatttatcaatcaaatgctctaccggaataataatcccctgttttgcataacgaaggagatcataatcattcattcccgcattaaagagcccatccggcagatttccaaactgtgccagtgccagatttttcttatccgcaaactgatctgccacaaagcaggtccagtcaatatgtacattcgtctgtttttccaaccgtttgaagattgttcgctcgttcggctcctgtgtagatgttgcaggagcactggtgataaatgataattctgctttttctttcagaggaaactccacgtcttcgactggtgtatccggattgatctctgcctccatcctttctttgcttccacatcccgtcattgaaaatacaagcacaagagaaaggcttgccgcaataatcgatttgattctttttttcatagctgcacctcctaaccatctaaccttttaccgaaccgaccatgattcccttatcgaaatatttctggaaaaacggatacatgatcaaaagcggcaaactggatacaacaatcgtcgcatatttcagtaattctgctacttttgccatttctgctgtactctggatatccgcaatcatacccggctgtggcgtattttgtaccaaaatcgaacgtagtacaagctgcaatggctgtaaattggcatcattcagatagatcattgcatcaaaatagctgttccacattcccacaaaagaccatagtgccaaaactgcaatgatcggtttacacaccggaagcatgatccggaaaaagtgctggatttcatttgctccgtcaatagcagacgcttctcgaagttcttttggaatagactgataatacgttctcgccaaaatcatattccatacattgaatgctcccggaagcaaaatcgcccagaccgtatttaccatatggagctgattcaccagaataaatgtaggtatcataccgccgccaaaaaacatggtgatgataaaaacagtattaaaaaactttcttcccacaaattcttttttagacattggatacgctgccaataaagttacaaaaactgaaattacagtaaatgctgttgaataaaagaacgaattcaaaaatcctctccatatcatttcattttcaagcactcttctatatgcatccagtgtccagtctttaaatttgaagctgattccctggctgttcaatacattcggatccataaaagaagcaaccacaacatagaccagcggaatgagtatcgcaagtacaaaaatccccaaaaccgcataaccaaaccctaaaagcactttatccgaagtgctaagtttcatttttcttcttgtttccatcttcgtacctcctaaagaccttccccgtcattgagtttctttacaatccagtttactgcgatcagaaggattacattaataatcgaattgaacaatcccactgctgtcgaatatccataatctccatttaacagaccgattcgatatacataagtagagaggatctcagatgctggaagattcatatctgtctgcaacgcaaatgccttttcaaatccaatgctcataatatttcctgcctgcaaaataaactggatgacaataatatttttgattgccggaagttctacataccaaatctgctgtaaaatatttgcaccatctacaattgctgcctcttccagatctttgctcgcatttgacagcgctgcagtatacatgatcgatgcccatcctgctgtctgccagattccgctggcgatatagattgtacgaaacgattctggcattgtcatccaattggtatcaatccccaacacctgattgattggtcctaccggagaaagaaacatacggatcataccacagagaacgattacggaaataaaattcggtgcatagatcagtaactgaatcttctttcgaattcctgcttttctaatgcggtttaaaagtaatgcaagaataatcggtaccggaaagccccatagtaatccatatgcactcagcttcaacgtgttcatcagataattcataaaatctggtgatgacaaaaaacgctgaaaatattccaaccctacccattcacttccaaacacaccgtcaatcacattataatcctcaaatgcgatcagcactccactcattggaatgtacttgaaaataatcgtcaaaagaagtgccggcattagaaagaataagtataactgccagttttttctgacatactgtagcttttgttttgctgtctgcttcaccggaaccgctttcttgtttgtaaatgtcctcatttcttttttcctccctgcttctttttaataaaccggttatgcaaccggtaaagtaaccggttacttttaattcgatattacaccagattctctaacatgtcaacatattttcataaatacacattctctgttcaccaaattttagtcttattgcataaccggttccgtaaccagttatttcttaattgcttttttctgctgttcttgctatactgaaagtaatttacagaaaacaggagttgttatattatgggcaaaaagaaagtaacctttgcagatattgcaaaatatacgaacttttccaaaactacgatttcaagatattttaatagtccagattctcttactttagaaaatcaggaaaaaatcgcaaaggctctggatgatcttggatatcaggaaaataagcttgctaaagttctggcaaatgggaaaagcgaatttataggaatcattattcccaatctatatctgcactactattctgagatgttgaatcagcttttgtccagctacagtgactaccactacaaattccttgtattcgtaagcagtgacaaaaaggaactggaacaacagtacctggatgaattgatggcttataaaattgaaggtctgattatattgagccatactttttcttccgaggagcttgcttcctatcacattccaatcgtcgcaattgaacgggaagctgagcatatctgtagcgtagacacagacaactatatgggagctgtacaggcaaccaatctgctgattcgcaatcaatgtgatgtactgattcatgtaaatgttcctgtacctgaacacgtgcctgcctataaccgtatccgaggatttgaagatacttgtaaggaacatcacattccatatgaactaatgcttcaggatcttggctatacttatgaaactacttatgtagcgatcagacaggtttttcaaaaaatagacagcacctattctggaaagaaaaaaggagtctttctttcaaatgatacttacgcaaatatatttttgaacctgcttttccaaaaatatggaaaattaccggaagattaccaaatcgtaggctttgataattctccgattgccaacgaagcaattctcccaattactacgattggccaacagattgataaaattgcaaaaactgcaatggagcttttgattttgcagatggatgagatgaaaaaaagaaaacctatccctttagaaaatcccattcacaaacaaatcacccctgttctgattcgccgtgagactacagattcctgattagagataacttttactggactgatttaaatttattttcacaaaggagacctgtatgagcaaccgacattatctgatcaattcagaagatcttcaaaatctgaatgccagattactttccattgctttctccaaagacgaaggtgactggaaaagtattatgcatacacatcattttacggaactcttatttgtagtcagtggagaaggcagcttttcttttaaccaggagcaatcgcctctacgccggggagatctggtcatcatcccgccttacacagaacataccgaacgttcctctcaaaatcatccgctggaatattatgtgctcggaattgatggaatttcattcctgtcccaaaaagacagagaatgcgcacaggtattctgcaattttgagcatgatcccagtattcatgaactgttccgccagatgctctacgaaatccggaccgcacaatacggttctcagaccatctgccagcatctgcttgagatcctgattctgaaaatcatacgatcccaacagctcattccagtatcgatcaactcgatccgaatgacaaaggaatgtgcccagatcaaagaatacctggactcgaactatgcagaacacattacgctggacacgctgaccggtttgacacatatgaacaaatattatatggtgcactcttttacaaaatatgccggactctccccaattcagtatctgaatcagacgcgtctgaagcgcgcacagcatttgctgaaaaataccaactattcgatttctgatattgcgtcctccaccggattttcttcccagtcctattttacacagattttccgaaagaattttaatatgacaccggtgaaataccggcaggaacatgcaaagaattaaattttatatctgaatgcccggatgggtacacaaaaaggaacgctctcacagaactttctatgatcgcgttcctttttcttttattttatcaatccctaaatctcataccacttaatttcatttgcttccatatccagatcaaagcaacttccatctccccggtacacagttgttctctgtggctcataagtattatttactacacagtattttccattcttcacatacgcatgtacttctacattgtagtttgtactgaaccacttatgcagatcttcttcatcatgagaagaccagatgatagaacgatataacagtctgctgttttcaaagctgtatggaagtccgctgatgtaaacgcagcgtccctgtccaaactcattgactgcaagctgtacttctttgtcaatctgtttgacgatcgttgtaccgtccagtgcaaagatgctctttttgccttctccgaagtcgatttcccctttacagtcttctgtgatgaagtgctcatgctcttcccagttgtatttatccatgttcagtgtaaatcctgtctctttttctacacccatcatcgttgcaagctggaagaagtgaccttcatactgatgagcagccggctctccgactccgataaatccgccgccattgtaaacaaatttcttgattgctgtgacaatcgtctcatccgtccagttgtctccgcctgtgtatgcagtatctgcatcaccgatattcagtaccacatcgatgtcatctaaaattgccggattctcacagatatcatcaaaactgataaatctgacatcaaacggagcaccgctgagtgcttcgattacacctgcataagagtagttctgtttgtagtagatcgcatgatgtaccatatgatttccccatgcacgcatcttgccccagcagtttaatactgcgaccttcttgatgcagtatggcgtcgttcctttgatatttgtatacagggtacggaattcgttgcagacactctctacataatcgataaattccgggaactccatcgccagttttaagtatccgccgtatccgatacggtcaatcggttttcttaaaatcgcacgtcttgcagtcacccagttgacttttgcttccttgaccggatctccgccttcatggaacgtatccgggaagaagtatggcaagaatcttccttctgtatatttcaccccgtcaatatcactgatcagacgcagtgtcgcaccgtttccaacacttcctacgactgcatccagaccgatggtcttgaactcatccataaacggttccattccgatccagtgatctccaaggaacatcatggcttcttttccacattcatgtgtgatatccaccatctcttttgcaagcttggcaacctctcttctctggaatgcctgaaaatccttaaattctttggatggaatccgatacgtattgttcatatatccctgatcgataataaattccggacggaacttatatccgacctcctgctcaaactgctccagaatatatggacttaccgatgcagaatatccataccagtctacataacgctctctcgccagttcatcaaaaatcagtgtaaactgatggaaaaatgtcgtataacggatcacgtcgatatgtggattgtcctgaatatattttctgagacgctccatggaatatttgtgtgtctttggctgacgcacatcaaatgtgatctgcttttcaaagtctgtccatccgtttgtcaccgcattgtacatatgtaccggatcccacataatataggcaagaaaacttactgtataatcatgaaatgcctttgcactgtgaatcgtcacatcaccattttcactgtcatagctccactgttctgtcggaactgcttctcccgtggtacggtcaatcacttcccaccatcttgtgatatcatcatgatcattgaccttcagcatatccggatacagatggttcatcagatgaatggataactcctcttccactgctgtataaaaaggagtcataatatacatctgctgaatctcttccggatttgccttcgcccatgcgttgtcttttctggttgtataataagtagaatatacttttgcatctacattctttaattcttccggataatcggttccgtcacagtcacggattgcatctgccccccagcgctttaccaaatccagtgtttccggcacaacgtccacatctgtagggatcgtaacccttccgctcgtacgctctttcaaaatgattctcctctctcttctctgttatagtctactttgtataaatcaagaatagaagaaaaccctgctttcgtcaatttgcttcttgctttcatttttagcattcttgctgttgtatttttttcgtgttgaaactgataattttattcgaattttacatcctcccgctccagagaaatataaattttcgttcccacaccgacacgggattccgcccggatgctgtgtcctaatttctgtatgatcgtcttgcacaggtacagaccgattcccgtagatttctggtgctctcttccgttatatccggtaaatccacgctcaaaaatacgcggaagatcttccggggcaattccgattccagtatcctccaccaccagttccgtgccttttatataaagggaaatgctccctgccttcggcgggcggacttcgtccgatgatgtgtatttcagggcattggacagtatctgctcgatcacgaacagcagccacttttcatcggtgagcaccatctgcctgctgtcctgaaaattcaaatggatctttttcaaaatgaagatctgggaatatttgcgaactgcctgccgcataatatcaccgatcggataccactggaatttcaggtcattccccatatcctccatccgcagataagacagtaccattcccacatattcttccgtctgaaaaatcttcattttcatctcatttaggaaatccagtgtctcctctgcatgttcctcaaattccattgcctgttcttcaaaagactggatcagaagatgcatggcggaaatcggtgtcttgatctgatgcacccacagactgtaatagtcagatgcatcctttttgctgaggagtacttcgttttccagcatctctctccatgcaaaaattgtctccgtgatttcctgatattctgcttcaatccggctctttggatccggaaactctttcaattcatgcggaagtgccgcagacagatccagcagactttgataccgcttccgataaaaccagaaattcagcgctcccacaaataaaagccagattgcagagagctctgctccatacccgatcacgtcaaaaggaacttcttttaaccagagtagtatacagaaaatcacaagcattacggcatatactccgataaccggaagtttttctttcaaataagaaatcaacaatctcattctatcacgtacccgattcctttctttgtagcaataaaatcacagattccaatactttccagtttctttctgagtctggtcatatttacagtcagtgtgttgtcatcaataaactcatcactctcccagagacgttccatgatccgatccctttttacgatctttcccgcattctccatcaggatctgcaggattttgaaatcatttttcgtcagctccatacgctctccgtgaaatgtcactgccgcatcgttcagatttaagatcacatcccgatactccaacacatttaactgcccggtaaaagaatacgctctccttaataatgcctggatctttgcagtcaggacattcagatcaaatggtttttccacaaaatcatccccacccatgttcattgccatcacgatattcatattgtcacttgcggatgataaaaacaggatcggcacactggagatctgacgaatctgggtacaccagtgaaatccattataaaacggcagaataatatccatgatcacaagctgcggatcaaacgctgtatactcctcctgtacacgtttgaaatcctgcacacatgccacctcataatcccacttttccagatgttctttcattttatccgcgatgacacggtcatcttccacaatcagtattttatacatcgtcttcccctttcacgcttttatatatagaaataatatccttgcttttgctcactgtcaacgacaagaatgctcacctttagaaagtctttagaattcttaagtttatatatattgaccgtatatattatattttctataatatgctcaaaagatagatatacggttttcttacctatcaaatatacgaaaggaagggattgattttatgacatttacactcaacacacccatgtttgattttcttgttctttctattatcgccgagggtgatgcctatggatatcagatcagccagatcatcaaacgagtatctgataccaaagattctgccctgtatccgattttaaagaaattacaggaaaacggctatgtggatacctatgaccagcagtttcagggacggaaccgcaaatattataagattacacaaagcggaaagatccggcaggaacacttaaaaaaggaatggaaagagtacattacgatcattgacgatattgtaaatggaggaatgggaaatgactaagaaagagtatatgaaaaaacttgcataccagcttcgtcgtcttcctaaagaggatttcgataaagcaatggactactttgaagaatattttgaagatgcaggcatcgaaaacgagcaaaaagccatcgaggacctgggcgctccggaagaagcggcttccgcactgattctggatctggcacaggaaaatgctgtcaaaccgccaaaaacaatgaaacggcgcttttccgctttatggatcgctattctggcactttttgctgccccgatcgccctgcctctggcacttgggattctggccgtgatcggagctgtcattctgggaatcctggcagtcgttggcggtatcttaatttccgcacttgccgcaatagcaggaagcgtactcggcattatcggagggattgcaattatccctcagacctttggcggaggactggtcaccatcggtctctctctgatgctgatcggatgcggcattctggtgacatatttcaccatattactggctcgctgggcaatcatcaaacttgccggactgctcggcagacttgtcaaaaaaggaggacgaagacatgaagaaaagtaaaaaaatcattctgacaatttccgcagtcacactgactgccggagtccttttaactggaatcggatatatgaagggcggtcggtttggattcgtcttctctgacggcaaatttatctctgctgacagtatagaagaggagaaacaaccatttattctggaaaaaaagaagctggattctgtaaaagacattgacattaacattttgtcctatgccgacatccggattctgccgtctgcagacaactccttttacctggagtataatctgcccggtgaatacccaaagccgtctttctcctgtacagacggcaagctcaccctgactcaggagaaccgggagcccattgccatcataggatttggttttcacgattcccaaagctccgaacgcgaagtgacactgtacgttccctcaaaagcggaattaaacagctgcaatctctacagtgactccggaaatatccaggcatcggatcttactgcctccgtttttggcatcggatgtgactatggagatgtcacacttaagaatatcaaaagcaaggaacagcttgctctgaatttaagtgccggacagctaaatgctgatacactctccggaaagacagtcacgatttacaatgacagcgggaacatttctctggattcctgcacttcggatgatcttcatctcgaaacggactacggagatatccagcttgataacgctgctgtgaaaaatgcatccgacatgactttagactccggaaccctcacgatcaaaaacagtgctctgggcgctgccaggatcaccaatgatagtggaactatttctctggctcaagtaaccggaaaatccctggaggcaacttcggaatatggggatatttccctgacagatacccagctttctgataacgctgttttaactctggattccggtaatctttcggcggataccagcagcgtaaaaaagatttctgtaaaaaatgacagcggcagtatttctctgaatcaattttccagtgaaaatgcggactttatgttatcctatggtgatctggatctgatcgcaacaaaacttggctctcttagctgcaagagcgaaaacggagatgttgccatacaactgccggacaaatttgattcctacggatttaatcttcttacagaatacggagatatctcactcccttccggcaaggctgacggcattgtttctgatgaagacgactcctctgaggtttcctacagtgcaaatccagaggcaaaaaataaaattcaggtagaatgtgaaagcggaaatatccagatccgttagcaggaaagacgactgactccactttctgaaaaagtggagccgccgtcttttttattcctttgaaaccacatataaggaatagaaaaatcctttcttttgcatcaactcctgaaatgttcccttttcgacaatttctcctgcatgcataaccaaaatctcatcatactgatacaacagcttttcctctagccggtgcgttacaataatctccgtcatttctttcattgataaaacagcatcaatcactgcgtacgatgtttgattgtccaatgctgcggttgcttcatccagtaataacacctgacttcctctcagcaatgcccttgctattgcaatgcgctgtctttccccaactgacagcttgttcccattttctccacaactgtcatttaatccgcgtttgtctatcaattctcgcaaaccagcctgatctgctgcttttttcactttttcctcatcaaattctttgaataatgtgatattatttcggatcgtatcacgaaatacaaataccgattgctgcactggtgaaaatccatccataattgtattgatcagtgttgattttcctgctccggaacttcccacaactgcatacttttttccaatttcaaactcaaagtttaaatgatgaagaacattcttgttgccgatactgacactgacatccttcaacgaaattccttttttcagcattcctattttgttttccttcatttgctcctgattgatctgcacacttaccagcattttttcaatcaacccaatcgcggcttttcgctttgccaaaatagacggtatcctctcgatcggggaaatcacataattcattaattgaagaaataccaacacaatccccggtgtaacaccctatcctgaaactgacatccaggctccgatcagaaaaattcccaatcgcatcattacacttgctgctgttccccacaaattgatgctttcttctatgtaacgactttgatacttcagatgttccattctttcattttccctgaaaaaattcttcttcatttctttttctgcctgaaagcttttgataacaggaaatctctgaagaatgtctcttacaatactcacaaactcaccgtttccatcagaaactttcctttcagcctccgccattttatttgcaatcggaaacgatgctgcaatcggcagaacagacagtatcaacccaaataccgtcagtatcggactataccataacatcagcagcaatgctcccacaaaactgaccgtcagatcaatcatttccagaacactgtcaaaataatacatttctatcatttttgcatcatttgtatacatggaaagatactggctggtattttctttgcgaaaggacgaaagatttttatcaatcattttacaaaatatcttttgtttataacacaacatcgcctgatataaatattttggtcgtgccactcgataaatcacgtacgccgctataaatatcaaaaatgttatcattgcaattataccaacctgcaaaatcgtcattgagctgtctcctgatacaatgtcaatgatcgtctgcagcagccatgaaatcacaatattataaatacttaaaatcaacatcgcaattcctgccatcacaagccattttctgctttgacaaacaatttctttcaaataccgtttacgtattctctgaatctcaatttcttttttcattctctgctccttctatttgcactgtctttgtcgccacagcctcccgaaaagcctgatcatgctcgaccagaagcatcgtcggggagaattcccggatcagttgttcgatctgcatccttgaatacagatccacaaaattcagcggctcatcccacacatataagtgtgcctgttcgcagagactttttgcgatcagcacctttttcttctgtccaccggaaaaatcctgtatttccttttcaaactgaatcctctcaaaatccagtttccgcaggattgctttgaataaagcttcctcgatctggctctttttcgcaaaatccgaaagtgtcccctgcaaatgtgacgtatcctgcggtacataagaaatgacgagcccagatcccatcgtaatcgtccctgtatgctccaaagcttctcccgccacgaatttgagcaggctgcttttcccacttccgttgcttccatccaataccacccgttctcctcgatggattgaaaaggacaccggacagctgaccggatttcccccataacaaactgccgcatccaaaaacgtaaccagtgtatccgaacggtattgcaacggaagcagttttaactcctctgcccgctccctgtttttcaaaagacctgacttctgctcgattgctttttgctgtcttgcctcgatcgacttggcacgtttcatcattttcgcggacttatgtccgatataccccttatccgctgccccggttttggatgcttccactcgatctgaccatccttgtgtacgttttgctgactgcgaaagccttcggatatccttttttaaagattcattctgcgcttcttccagtcgctgctgttgttcaaaattttgaagaaacgcagaaaaagtaccgctctgtacttcaatattacttcgattcaaagataaaatatgatccacacacccatccaggaaacacctgtcatgggacaccagaataaatcccttcttttttctcaaatactccgatacaatctgtctgccatgtgtatccagatgattggtcggctcatcgatcaacagaaaatgtccttcattcaaaaacagtgctgcaagaaggactttcgtctgttctccgttggaaagtgtctcaaaaggacgccaaagcacttcttcatccacttccagagcgtaaagttccttccgtatctgccactcttctgcctgcggacacacctcattcagtacttccatcgtccacttttttgtatcttttaccaaatacggaaaataatcaaaccggactgattttataattttccctcgatactcatactgatccatcaaaagatttaaaaacgtcgtctttcctctgccgtttctccccacaaatcccagtttccagtctgtgtcgatctgaaaactcacattttcaaaaataggatcataactggacggataagaaaacgtaagattttctacttttatcatcgacattgctcctaccccctaacatcaaaaaaagctgcaagaaagtcaattcctgcagcttctcatagcacaaaccatccccatatcagacgtatgcggccaatgatccatatctgtgaacaagactcttaactttcctgcaaaaaggcgcaatcattgcgtatctgcacaatcactgctgttttccattctacttgcaagaaaaattaatcatccttccacctctttcatttcaaatctgtttctaacatatcacaagatgaaaaaacaggcaagccttttttgcctgcctgtcagaactctttgtttcgattacagctcttcttcccactgagcctctttaaatccaaccagcacctgatcctctgttactacaatcggacgctttacgagcattccgtctgaagcaagcagtgccagctgttcgtcctcgctcatttccggaagtttatcttttagcttcatctctttgtaaagcattccgcttgtattaaagaagcgcttaagaggaagcccgcttctctgataccattcttttaactcttccagtgacgggttattctctttgatatctcgttcttcataagaaatctgatgctcatccagccactttttggcacgtttacatgtggtacatttcggatagtgtacaaataacatcggtctgtcttcctttcttttcgtattagatttcgtttgtattctatatcgtttttcaaacttttgcaattacttatttctgggattctttcgcaatccgcagtcttacccatgcgcctttcatcctcgtagagttggccaatgtaagacttcctccgttttcttttgcaaattgctctgccagatacaagcccatcccgtaatgtttcctggaatgtctgcttttgtctccctgataaaacagtttttttgcagactgcagatcttccgccgaaaatccgctcccctcatcctctacggaaatttccagttgttcatttccctccgatatacagattcgtatcattcctccctgtggcgtatattcgattgcgttatataccagattttcccaggaccgtatcaacagtttctcattgacacagatccactttggcagattttcacattcaaactgaatcgtttgctttttcccggcagccgccgcttcgatccgctctctgaattgtcctgtcagttctcgtatgtccacctgttcttttttgtacatctgataacctcctgtggagatcatctcctgcaaaatctgcaaatattcttcgattccctgaatttccagttccaatgcaaggctgtacttttgtgcttcttccagactctctgcctcttccatcagctgtacgttcccccggatcacagtcaaaggtgtcttcagatcatgcgccagcgctcccatctgctcttttctggctgattcaagctcccactgcttcatcagagactctttcagtgtatcccgcatttttccgaacgtctccaggattttcttgatttccagaacctgagaatccggacatggaaattccagatcctgatgctcaattttttctgtcatccattcaattttttgaagttcttgtttaatcttccagctgaaatatcggatcaaaaacatcacttccgcacaaaaaatcaaaagcgctgccagcaaaagtaattccagaacatgcggaaaccgttctctgagtgccggattcccaaattgaacacgaagctgataggataccagacagattccctcttctctctggaatcgtttcagatatccgctgctgatttcatttttctcttccagaacagcttcccatacttcttctctttctgattctgtaaatgttccgtaaagccacctgcctgaattgtcaaacactccaaacctggttccgtatggaagcattttttcctccactttttctgctgtctgaatctcttcccttttttgctccaactgctgttcatcataattagcgggatgtatcaccgcctttatggtcaaaatctggacaatcactcccaaaaccagtatagttgctgctcctgcaagtaaaaaactaaacagaaaacgtctgaaaatccctgaaatattcttttgccttactcccacttgtacccaatcccccacactgtctgtatattcttcttcccatatctggcaaattttgcccgaatatttttcacatgctctgtaattgcggagctgtcactttctctctcatatccaaatacactctcaaaaattttctctttagaaaaaacctgtccatggttcaatgccagaagctcactgatctcatattcacttttcgtcagaggaattttctcttcccccacctgaacactctttcccgccagatcaaaacgtactcctgaaatttccactgcatgtgttttttctctggcttctcttcgcaaatgtgccgcaacccttgcccggagttctccgattccaaacggcttacagatataatcatctccaccggaaccaagcccttccatgatacttttttcctccgcttttgctgtcagaaataaaatcgggcagtccacataccgtctgatctttttgcaccaggtgatgccgtctgttcccggcatcatgatatccagtaaaatcagatcatagtgaatcaaatccttttcctttatcacctctgtattttcacatacactcactcgatgtccgtctttttccaatgcattctgaatcagatttcgaatcccttcttcatcatctaccgccaatatccatgccattttgactcctctttcctgtcattgtgaaatgcttttcctgtcgtgatgctgtatccagatacaccagaggatcagccctgttatcgtcattcccaccattgagagaacgcccgtcctgatctgttctttcagcatttctcctgccattttaaacaattcgctctctgttttccattttacataatacaacagcagatgtccactccatccacatggaaaccacatccagagtccgtctcctaatccagtaaagagcagtgccgcaatcagactctgcgtcacccctgctgccagacaggctccacttccgaaacgcattgccagaaaaaagtgcagaagatagattcctgcctgcgttatccacaagatcagcccgcatataagatattcttttaccgacagattccacgcagctttcgttccccagacgcccattccaaagagtaaaaaagcaagcaatgatgccgccagtccgagaatccaaagtgtgagtatctttctcaacgttgcgctccagcgcaatgttgacacacacagcagattttgaaaatttcccgcctttaattcctgcatcacagactgcatacagatgatcgcagaaacagacgggtacacgatcgcgagtgtttctgcataaaattccagtacactctgccattctcttttggcagccactccatacaataaaaacaatcccgcgcctgcaacaggaactcccaaatggatccagaaaatccaggttcctttcaattttaagaattcacttcccaccagtttttttatttttcccatccggcttccatcctcctctgataccatcttgctgtcatagctgtcaacagggcaaataatcccatactgagtaagattcccggaatgatcacactcttttccagtacctgcggcgtaaacatgacgctttccggcactgcaggaagtccgtttggcagtatttgaagaaccggacacatcagccttggcagaattgcaaacggattcatccaccatctggatcctgttgtccaaacagtcgaaagaatagaattcgctcccatcccaagtaaaaaggtcaggaccatccccgtcttttgataacaaaacatccacaaaggaatctgccagcatatcgcgcaaactaacagtccccatgctgctgccacagtaatcggggaaaacagatttcctccggtaaataattgtttcaaaaccaaactgattccagctaccgccgctgcgatcattcctgtacttacaatgatctgcccaatgcagctgacaacctttgctgtccagatcttccctgctgacaccggaagcatctgcaccgctctgtacttcagacgtttctccctccggcagataaaaatactgcctgcgattacctggatcggaaggaaacacatataccaccagttatactgattcatctgataatatgttgcatttccaaacgagaaatatacagaacataaaatcgatatcgctggaaaaataaccatcagtcttgcccattcggaatgtctgtttttcagaagctctgccttgatatatgctctcatatccgttcaccccctgtttctgctcacaatttccgtgaacagttcttccagattttcctgctgtcccccctgatatcccaatactccatttgccaggattccaatgtagtctgccgtttgctggatttcacctaaaatatggctggagacaagtactgtcatcccactttctgcaaaagaaaccagcatttcccgaagctgacggattccaaacggatccagtccgttcgctggttcgtccagaatcagaaaatccggatcatttaacaatgccaccgcaattcccagccgctgcttcattcccatggaaaactttcccacctgctttttccccgtatttttcagatccacaatatcaagtacctccaggatccgggcatctgaaatcccaagcgtccatgtccgcactttcagattatccactgcacttaaattttcataaacaggaggcagctcgatcaaagccccaatccgttctatgcactttcgactccatatttttccgtcaaaaaatacttccccagcatctgcccgcgtcatcccgcacaatattttcatcaatgtcgattttcctgcgccatttgctcccaaaagcccgtatacacaccctttcggaattctcatattgatatttttcagcacagtctgtttgtgatactgcttgcatagttcttttgtttccaaaattatttcttccataaaatgattctcccttctctttgtacagctttactttaagggcgaattctaaggattttataaggaactgtcatttttttgcacaaaaacccatacccgccttgcgaatttatctcaatatgttaaaatatagacgttaatatgtgaacttctatagattgacagaatcatagtgaaaataaaggaggaactttaacatgcattgtgtcagaaaagtaaccgaagatttatactgggtcggaagcaatgacagaagactggaactatttgaaaacatttttccgattcagaaaggagtttcctacaactcttatctgctgctggatgaaaagaccgtccttttcgatacggtagacagcgcagtaggcagacagtttctggaaaatatcgcggctgttttgaacgggcgtactctggattaccttgtgatcaatcacatggaaccggatcattgcgctttgatcgaggatctgcacctgcgttatccggatatgaagctgatcggaaacgccaaaacatttccgatgatcgatcagttctacggcatggatcttggagataaaaagatcatcatcaaagaaggcgagacattctcctgcggaaaacacacacttcactttgtgatggcgccaatggtgcactggccggaagctatgatgacttacgatgagaccgataaagttttgttctctgccgatgcattcggtactttcggagcactggacggagtgatcttcaacgatgagatggatttcgaccgtgattatctggacgaagcccgccgctattacacaaatattgtcggaaaatatgggattcaggtacagaatgtcctgaaaaaagcagctgcattggatattcagatgatctgccctctccacggacctgtatggagaagtaacctctcctatattctggaaaaatacgatatctggagcaaatatgaagcagagacaaagggtgttatgattgcctatgcttccatgtatggcaatacagaaaatatggtcaatgttctggctgccatgctcgctgatgccggaatcacaaatatcaagatccacaatatttccaaaacacatgtatctgagctgatttctgacagtttcaaatacagccatcttgtacttgccgcaccaacctacaacaatggaatttatcctctgatggcaaactatctggaagatatgaaagctttgatggtacaggggcgcaccgtagctgttttaggaaacggaagctgggctccgcagtccgcaaaactgatggaagcaaagcttgcagaactgaaaaacatgacacttctgacagaaaacttcgctgtaaaatcagcactgcatgattctcaaatggaacaactgcaggaactgtgcacaaaaatcacagattctgtcaacgcataaattctgacaaatacaaaggaggaattcatatgaaattagtaatcaccatgagccgtcgtttcggaaccggtgcaagtatcattgcagatgaactttccaaaagactggacattcctgtctatgaccgtgcctatattgaacagcaggtcaatgaccgcatgtatgactccgaggcagaagccatccgtaatcttgccgaaaaaccatgtatcattctcggacggtgcgcttctgatattttaaaagaccgcatgaatgttctgaatattttcgtatgtgctgataaagaagaccgtatcaaacgcattatgaagctggaagacctttcctacgaggatgcaaaagagaaaatcgataagactgatgaacagcgtgcttcttattattatgaacatacaggaaaaacctggggtgatgtaaatgactatcatatgattctggatacctccgcactgggagtcgaaaattgtccggatattttaatgcactatttcgaaaaactggaatacatttaaatcgaatgtaaaaataaaaatcttccatagaattccgtgtttcccgacacatgatcttctatggaagattttttacatcactctctgaatccatacgaatgacaagtcagaagtgtaatcattttctcgcccgaacagatttttgtatcatctctgcaatgacctcttcctcttcttccagctcctctgcaatctcagaaattgactttccttttaccagcttcttttgaatcagcctttctaaaagctcctgttttccctttttaattccttcttctatcccctcttctctgccctcttcccaggacgcttcccgctcctgccgcatatgcttttcctcatcatattcataaatactcacttgtttcgcctccgctctgttttgtttcaaaaactctgaaagaatcccttcccgaatacactcactgattgcctgttccactgcttcttccaccggctttacctgggcgtactcccgcactcttgcagtatattccgagtaatccttcagagatttgcacatttccttcaacttttcattatgcccgcggttgatgttcagcatcaccgcagtcaattccaatgccggatgttcttctttgacgcaatacgcatcagacaatcttaaaatttttcgatccggctgttcctgacttccattgtaaaaaatcacaaactgcggggtcgggatctgaatccttttcgtaccatacaggttttcatctttcgctcaaacctctctgctgttttagattgaaatcaaagcatagagatcttccgatatgctataagaataaaagatgcggtatcgttccgcttagaaaaccagaattttatgcttttctgcattatagcacgattgaccaaaaagaacaagctactgtaaaatccatacataacggatttacagcaacttgttcttttttattttacgatcttataatattctcttgacgtgattgcaaagactatcacatagaatactgcaaagactgctgatactccaattgtgcacatcatggataaatgtgtatctgacagattaaacacaagaaggagctttgtaatcggtttaaatgccactgtcacatgcaggatcgccataagaagcgggacaaagaatactgtcaaaatctggctgtgaatcgatcctttgacttctttcttactcattcctactttctgcataatctgataccggtctttgtcatcatagccttcagaaatttgtttgtaataaatgatcaggaccgtcgccatcaggaataagaatcctacaaaaattccaaggaagaaaaatcctccgtaaacgccataaaattcctgtgcataagcttctctgtattctacatagcatgactgcacctcgccgcttgtctccatccgcgctttcatggattccagagcttcactttttgcagtgtcatttcccttcatatcaaaattcaacagatactgcatcgtgatcggaattttggtcggaccatagagctgtatcacatgctctacagctgcatcatccgccattaccagataaatattctttgtcacatctgcctctttctttttctgcagattggattccttcaagttttcttttacatgataagtctctttacctaacacgatttctccgctgtcaaactcttcatccgggaaataggtcagcacttcatccggagcaagtgaaatatcggttccttccagtgcattataatctgccaatggaatcacatacaagctgcgcatcgcatctgcatcatatccacttcctgaatccgtatcaaacttgagctgattgtcatatttcatggcgctcagcggcacataccggtatttttgttcatgaataatctccagcccccggctttgcgtctcttcctgcgcaatccgttccatcgcttgtatattttccggagttgtttcatcagatgttgcggaaaattcagtcttaaaacgggtattcattatattttcctgcccgatatacaaggatgctgtcgcagaaattaataccagtacaatggtactcataatacagatatttgccagtcctactgcattttgtttcattcgatagatcagacctgacaccgaaacaaaatgttttgtcttataataataggctttatttttcttcaataattttaacagcgctacacttcccgctgtaaacagagcgtaggttccgaaaataaccagaattactgcaataaaaaattttgtgatcgcactaagcggtgactctgtcgtctgtgcaatataatatccgcttcccagcaaaagaattccgatcactgcgatcagccagtttgcttttggttctttttctccttttttccctccctgcagaagttccaccggattgactctctgcacctggaaaatgttccagatcagaatcacaagaaagatagctccaaatagaccggcactgatcaaaatagcctccggttccacagaaaactgaaatgcaacatcaaaccggatcaatttcaggagtaccagaaagatgagccgtccaaatacgattcctgccaggattcctccaaggatacctgcgcccgcagtatagatgctctcccagaccatcatctttgtcaggttcgtcttatccattccaagcacctgatacaatcccatctctttttttctctgacgaaccagaaaactgttcgtataaaagagaaagattgccgaaaaaccacctgtgatcgtaactgcaaaattcaggatcagacgcagctgggatgcaccgggcatggtatccagcgccgaattggtggagactaacaagagatcataaaacatcatgacagtcaaaatgcaggtcagaagatacggaaaatacgtctttccgtttttcttaatgttggtcgcagccagctttggatacaatacattacgcattgtcctcacctcccgttgtcagcgcagtcagtgttgcggatattttttcatacaattcttcattgctcatattgccgcggtacaactgatggaacacttctccgtccttgatgaacagaactctgtttgccgtactcgctgccttcacactgtgcgtcaccatcaggatggtctgtccctgctgattgatctccttaaacaagcgaagcagttcatctgcagcccgcgaatccaacgctcctgtcggctcatctgcaaggatcagcttgggctgcgtgatcagcgctcttgccactgccgccctttgtttctgaccgccggatacttcatacggaaacttcttcaaaagttgagtgattccaagctgctgtgcaattggtttgagtttctgactcatctccggatactttttgccggaaagtaccatcggaagatagatattgtcctccagagaaaatgtatccagaagattgaaatcctgaaatacaaatcccagattctgccggcgaaatgctgccatttctttattgcggatctctcccagatctcttcctttcaggtacaccttcccggatgttggtttatccagcgctgccagaatatttaaaagtgttgtctttccggatccggactctcccatgatcgccacatattctttctcctccaccaaaaagttcacattggaaagcgcctgtacctgatttcctccaaatcgtgtggtatatatttttttcagattctttacttccagtaatgtcatcgtcattccttcctttcatttctcccgttttcttacttctcgtttattataactggaacacagaagctttttccattgattcacattacaaatcacaactgttgtcttacgtttttgtaaggtttggctttccggcagataaaacattgccacatctcatccgcaatgttacaataagtgtcagtttgaatacaaaggagttttcagatatgaaacaagaacgatggaaatctattttaaaaccactgaccattcttccggtcattgtcatgctctgtaccatctttggattttccaatcagaacggaacaacttccgggggattgagccaaaaagtaagcaggcagatcgtcaccgtctgtgataccctctttcatcaggattgggaggaagaaactatcgaacactatactgaaaaaatcgaatatcccatccgcaaagcagcccacgtcacggaatatctgatcctgactctgctggctgccctgccgctttatacctatggtcttcgtggaaagaaactgcttttcgctttatttttattctgtgtcatctccgcatccggggacgaattccaccagtcctttattcccggcaggtctccccagattacagatgtacttgtagacagcatcggaatcctgacaggatgcggcatcacatctcttgtattacgtaatcgcccgtccgatacggcttcttcgaagaagcgtaatacacagaaaggatagacctccgattccggcaatcaggaccggcactgcaatccacgcagatacagcagccggttctgcatattttttatatccatccagaaaaagaatgtggatcagatagatcccaaacgaacatccgcaaccgatatcaagaagtcttcttgtcctttctttcagacggatctcacagtcctgccagcgaataagaatcataaaaaatgcagcgcctgcaagtacgatgagcggacatccgtattccagaacccgttcataatgctcccctgaccgctgtgtcagaaagactgtcagagcaaacacgccggtcatacagccgataaaaattgcagctgcccatttctgactgattcggatatatctccggtacttataaataaaatgcccgataaaaatataaagcatatacaccttgtctccgatcagcggcaaatcataatacgcttccccattttgcagggaaaccacatagttaaagactacggaagcgctgcagacaacaagcagagctctctccagttttccgctcattcctttgcacatgacctgaaaaaacggcaataccatataaattgggatcatcgcataaagataccacaaatgaggttctgtcggtacatacagaatctctttcagatcatattctgtcttcataaaagcacgattccagatatagtacactacactccatactaccagtgcgatcaaaaaacgaagcagtctctccccgtgttttttcaacggttcttctcttcccagaagcaatgctccggagatcataaaaaaacagggaacacttactctcgccagtgtatccagtaaaagtgcaaacaaatactcactctgtgtaatttctccatatgccctacaaaaataattggtcacatggatcacaatcacaaaaatgcaggaaatcatccgtatgatctccagattataatttcgtctcatttatcttctcttttcgtctttctcttttgtatccggttcttttttcatcagacttgccttaatgacagtcccttttccaaaacgggcatccagcttctccatcgcatcttttaatttctgatgcttctcatccaaaggcttggggatctcaatatcaaaaatagatagctgcataggctctttttcatccaccagttttgccgtccggattccaagcagacggaccggttcacctgtccatacttcttcaaacagttcacaggcactctcgtaaagaacattctgatccgatgtcggccgcatcagctgtttctgatgcgaaatctttcggaaatcataatatttgatttccatactgaccatggatgctttctgaccggcttttttcagcctttcaccaacactcgctgccagatgtgcaaagaccggacggatttcttccagtgtttctgcatcctttgacaatgtcgtagaatttccaaccccttttgcttctgcctgctgtgactgtacactggaatgatcgattccgtttgcaaactcccagagcatctgtccatggctcttcaaatgcagcgtgatcagtctgggatctgcctgtgccagatctccaatcgtcagaatttccagctttttcaggatctccacactggaatgccctgccatatacagttctccaatcggaagaggccacattttcacacggatttcttccggaaacaaggtatgtaccttgtcgggcttttcaaaatccgaagccatctttgccagcagcttattcgaagaaattcccacattgaccgtaaaaccgaacttctcccaaactccgttcttgatcaacatagccgcatcaaccggagaatagaaaccttccatcgcctgtgtcatatccacatagcactcatccacactgacctgttcaatttctttcgtaaatgtccgaagatagtccatcagcatccggcttttttcccggtacatcttatgatccggcggttctatcaccagattcggacacttacgaaaggcattcgcaacaggttcccctgtgcggatgccatatctttttgccgggattgactttgcgaggacaaccccatgacgggatttctgatctccaccgatgatcgacgggatcttgcgcaaatctgttccggcaccattttttaattgttcaactgcagtccagcttaaataagccgagttgacatctatatggaaaataacgggtgtcatgcgacgatctgtcctttcacttttgcctctaattttccgtcaacaacatcaatctcaatccgatctcctctgcccacatctcctgcaaggatcagttttgctgccagcgtctccacattcttctggagatatctcttcagcggtcttgctccgtacatcggatcatatccgccttccactacgaaattcttcgcagcatccgtcagctcaatggagagttctttgtctgccagacgcttgttgacatcttttactaacaaatcaatgatggcatgaatattggatttcgtcaatggtttaaacataattatttcatccagacggttcaaaaattccggtctgaaatgtgctcttaagtcattcatgaccagattctggtttgattcttcgatcgtgccatcttcccggattccttccagaagataattcgccccgatattggaagtcatgatcaggatcgtattcttaaagtctacggttctgccctgtgaatccgtaatccttccgtcatccagcacctgaagcaggacattgaatacatccggatgggctttctcgatctcatcaaataatacaacagaatacggttttcttctgactgcctctgtgagctgtccgccttcgtcatatccgacatatcccggaggcgctccgatcagtctggacacggaatacttctccatgtattcactcatatcaatgcggaccatgttattctcatcgtcaaacagactctgagcaagtgccttggcaagttctgtctttccaactccggtaggtcccaggaataagaaggaaccaatcggtttggtcggatctttgattccggctttggaacggataatcgcttctgttaccagctccactccttcgtcctgtccgatgactcttcggtgcagctcgtctcccagatgcagcgtcttacttctctcactctcattgagttttgccaccggaattcctgtccaccgggaaatgattcttgcaatctccccatctgtcacagcctcatgcaccagagaaagatcttttgcctttaccttttcttcctcttcctccagctgtttctgcagctgcggaagtcttccgtactgcaattccgccgctttgttcagatcgtattctcgctgcgctttctggatctctttattgacctgctcgatctcttctctgaccttctgtacccgctctacagatgtcttttcattctcccactgtactttcttgcctgcatattcttcttttagtcctgccagctcttcctgcagatgttccagacgctctctgctcaaacggtcctcttcctttttcagtgcctcttcttcaatctccagctgcatcacacgtcgtctcagctcgtccagctctgtcggcatggaatccagctctgtcttgatcagcgcacaggcttcatccaccagatcaatggccttatccggcaggaaacggtcagaaatatatcgattcgacaaggttgctgctgccacaagcgcactgtctgtgatcttcactccgtggaatacttcataactctctttgagtcctcttaaaatagaaatcgcatcttccacactcggctcttccaccatgaccggctggaaacgtctctccagagccgcatctttctcaatatactgacgatattcatccagtgtcgtcgcaccgatacagtgcagctcgcctcttgccagcattggctttaacatatttcccgcatccatggcaccatctgtcttacctgctcccacaatggtatgcaattcatcaataaacagaatgatcttgccgtcactgttcttcacttcttccagaacggctttcagacgctcttcaaattctcctctgtattttgctcctgcaaccagagctcccatatccaatgcaaagatcgtcttatctttcagtccctccggcacatccccgctgacgatccgctgtgccagcccttctacggctgccgttttaccgaccccgggctctccgatcaggaccggattattctttgtcttacgcgacaggatccggatcacatttcgaatctcttcgtcacgtccaatgactggatccagcttctgatctcttgcccgctccaccagatcctgtccatatttgttcaatgtatcataagtcgcttccggattatcactggtcactctctgatttccacgcacagtagaaagtgcatgcagaaaaccttcccgactgattccaaactcacgaaataacggctttaaatctctgcttgcatatttcagtaaagaaaggaaaatatgctctacagaaacatactcatcacccatctgctttgcttcatcctctgcatggatcagtgcattgttcaaatcctgaccgacaaacacctgcccgccctgtactttcggacgcttattcaaaagctcttctactctgttaataaacagaggaccctgaatgctcatcttttccaacaattttaagatcagactgtcatcctgcgtgatcaatgcgtataataaatgctcctgcgcaagctcctgattgccataatcatacgcaatcttttcacaattctgcactgcctgcattgaattctgtgtgaatttatttatattcatagcaactcctcctcactacttgtttcattgttctacacgtaatatagcattcattattagccacgtcaagagatgagtgctaattcttttctaaaaaatttataaacactaatccctgatccggatcattatctgcgtcacataatagtgttcttttatttacttcatgtaattttgcaaactgagctgttgtcatcctcatactatcttttttcatcattttttcttctttctcttgactttacactaactgtatactttatcctgtccattgtcaaaacattttacaggagaaaacctggcattatgatgacttttgcagcacaaaaacctccagaaagctggcaaagattttcctgtgcagctgccttacaaatcagaccttttccagagttgccctcttaaaccaaaaaccggtcggtattattttagggaaaagctgtgctgtccacaaatgtccgctccctctccggatcagacagatttcatccatcacctcattgctgctttccggggaaggtcgtaaaacagcaaaaatttttcaggacgtcgatggcatagacaaagaacttttaaaagaatgcggcacttcctatcctgcccttatgatctattttaatttacgtaaaatcgtaaacaaacagatacttgcaccttttctatctgcttacttttctttcctgctgaaaataatgaactccaaacagaactcctgccagaaacagtgccattcccaatcctgaataaaacacagcgatgaacacatccggtgcaaaatgggaggctcgaagaccaattccaaaagtcatcataaatgccatgatcaaaaatgacttcttatcaaaaaaatgacagaaaaactgaagctcatcttcgtagttttgaattctgtcggtatgtctgatcaccagtttataaaataccatcgaccagaatacagcaaaaaccagcgctgagagcaaaatattcacaactgtcacatgccccgtatagctgagtattccaattcgaataatattgaaccccgcaatcagccagacaatgctggccagtagcagtaatgttcttttttttactttcattttgttctcctctccaatatgaacattgttcatatttatgtttaaaatttcccactttttaaaagtgggattcatagatactgtgtgcgatcatcgttaaaagtggttcgcagcttttctgcttttccagaagaatggacatcagaagtgtaaacacatactccacaaaaatttccggagtcagctcattttcaaatgcattctcacgcacattctggtcctctgtcaatatctgaaccagatttttcttcaaatgcatcagggaaatctccatcattttccttccctcatttttatcttttgctgcaaaactcatggaatgcagattaaaaaactccggatacttctgactgcttttatacaccgtatcaaacaaccaggcaatacatgctgtaaagctttcaaatacaagtacctgtccattcatatgaaagatatccatccatacactttcaatcgtcgcaagtaaaagttccgatttggatggaaaataattatacacggatcctaatgcaatgttgcaccgggaagccacaagcctcatgtttacggacgaaagcccttcttctgccacaatctctctgcacactgcaagtatttcctctcttgatgtaactgccatattcaaatctgcacctccattctgaacaacgttcattatagaatttcccagctttgattgtcaagttacttttctgatttttttccatttctgccttttctttcttcctctcaggaattataataaacacagatcattataacaaaacaggagagatttatttatgagagcttatgaacgacttttaaaatacgtaactgtacgtaccccaagtgatgagacaagcactaccgtaccgtcttctgcctgccagtttgacctggcacaggatctgatccgggagttcatcaatttgggactaccaaaggcacggacggatgaaaaatgctatgtctacgcacagattcctgccacgccgggatatgaaaattgtccgaagatcggatttattgcacatctggatactgtttctgacttctgtgacaagaagatcgttccggttgtaactgaaaactatgacggacgcgaccttcctcttggcggttctgacggacgggttctttctgtctccatgttcccgcatttaaaggatctcaaaggtcgtactttgatcaccagcaacggagataccatcctcggtgcagacgacaaggccggagttgcagagatcatgaccatggcagaacgggttttgactgaaaatatcccacatggtcagatttcgatcggatttactccggatgaggaagttggcagaggagcggatcattttgatgtcgaaaaatttgatgcggattttgcctacaccatggacggagacaccgaaggtgagattcagtatgagaacttcaatgccgcagatgcgatctttgagatcaaaggcgtgaatgtacacccgggatctgcaaaagatgtgatggtcaatgccgccctggtggcaatggagatcaacgctgccctccctgagggagaaactccagcggataccgaggactatgagggattctatcatcttgtaagcatgtccggcgatgtagcctgcgcaaaactgcattacattgtccgagatcacgataccgacaagtttgccgcacgtctggaaaccttaaaagaaatttccaaacagatgaatctgaaatggggattgggcaccgtaaaactgaccattgatgaacagtaccgcaatatggcagagatcataaaagatggaaacatgcatctgatcgaaaatgcgaaaaaagcctgccttgcagcagatgtcacacctctgatccttccgatccgcggcggtacagatggcgctcgcttaagctttatggggctgccttgtccaaaccttggaaccggtggacatggatatcacggaccatttgagcacattaccgctgagggcatggataaatccgtagaggtgatgatcgaactggtcaaactgtatgcggaaatgaaatgataaaaaagaatatccagacaaaaggcacagacgggatgtttcccgctgtgccactttttatccgcaatctttttcttacaatctctcaccgttttcatgcataaatttgtattctgcaacagaacggtcaaatgtcttaatgtggttgtacagccattccaccacatttttattcactgcttctacaaatgcagcagacggcccttcttcctcttccagcatattgtagagatctcttacgacctgtcttaatttttcatgctcttctttgtgcttttccacacccggatatgtaatctcttcctgcagtttttcttcttctccaaaatggaattctgtgtaatctgcgagataatccagtgtttttacagacaccaccttatctttacttgtctcacagctgtccaataatttgttaatcttatcaatcagttccttgtgctgggaatcaatcatttcgtttcctgttaccaaactttcatcaaattctgctctcattgtgctacctcctaaacttcaccttgtttaaattttatgatcatttcattggttaaactgtctctggacggctctaccggaatctcgtctctttcaaaccattccgccagtgccagttcctcttcatccagtgtcacttctgcgtcaccgtccagatcacagtaaaatcctatcaacagggtatcactaaatgcccatggctgacttttatagtatcggatattctttaccttcaatccgacttcttccatcacttctcgcgccaccgtttcttccaccgtttctccgatttctgtaaatccggcaagaagcgcatattttttataacttcgtcccgcatacttggacatcaggatccgattaccgtctgtcactccaataatgacagccggacatattttgggaaattccatatttctgcagtgttcacagaaaagcatcctctcttttgtatcatgacgcatcttatgtccacagcttccacaatatctgcgtgtctgataccaccgatacagctgatatcccgtgattcccgcaaatgcgctatactgaggatctgctgtcctgaaaatctccgtattctccattgtaaactcgcagtggggggcccggttcagattatcaaccagataatactgcttctcatcaatcgtaaacaggtaaatactgttctcataaagctcttcattcaaccgttccagttctccaaatgtcggaaactctattcccgtctgtgtccgcctcatcaatgctgtgtgttcctcataatacaatgcaatgctgttcttttgcggcgaaaccggcctatattcgtttttaaactgatgcggtgctatgtcctggatcattttactcacttcctttcttgaaattatgcaaaaattcactgagtaaaatcagaatacttcctgcggcaagaaaaaaatctcccaggttgtatgtgatctttgtcagcttctcatcagaggtctgaaacccgatataatccaccacatatccccgcatccagcgatccagtgtgttgctccacgcacctgccacaccaagcgaaatccctgcttttttcaaataactgcctttttttcgcaaacacaaaatatccaagacggtcagaattccggccataacaagagatgtatactttacaaactgcggatactctttcaaaagactcatacacatccccttattatgcacttttctaaggacgatctttttgctgtccgcaaacggtttttcttcctcgtccggccacttttccacttctgatttgactgccatatccagacacatcagaaatgccgtcgccccggctccaaacagatttttcatattctgcctctattcttctgtaaattctttgattttttctgctgcgtcctctgctttttccttcactgcctctgaaaggtctttgacatgctcacaggcagcctctgctgttttttgtgttttttccacaactacatctgctgcatcttctgtcttctctgcaactgtatccattgcgtgtgctgttttttcttttacaaattcaaccgcctgaccggccttttccctgatcacatcctccgtttcatcccaaatgtcttcttcttttttagctccgcagtatggacagtatgccatctctttttctacctgttttccacattctgcacaagtactcgttcctttgatctcctcgatctttgcctgatgtctctcgatactttctgttctgttatcaattttttcacacagcatctgtacctgttcgtccatcacctctcccgcctggtacttctcgtagagaaagcgtccaatctcctgcatatccgcctcattgccgcgctccagagttcggatctgtcctctcaatcgctgtatttccatcatctcgcctgctttacttgtcacagtttctgttgtctcaccgatttttttacctaagtcttcaaaaaaagatttcatctttcttctcctttctgtcacatatctgttattttcaacagaatttctcgtgcatatatacattataccccaaacgttcataacttcaaccagatttcttctgttttcttctttccgcttcttattttgaagctttcggcatatactttcaaaaacatccaggagatcatttcatgccatactctgacttatgccgggaaaaaattctttctgaagattatcatgattttattgtctccgacatccgaatgccctttcttcaagatatgcttgaaaaagactactgtcttcaaaaccccggctttttttatcaatgtgcttaccttccaaaatctgtaataaaacctgtatcgctggaaaattattcttatttttcgattccgaaatgctactccctgctcagtatgcaggcgctaaatcaggccggaatccttccgatccagaaccactccaccattcaattaagcggaaaacaggttatgatcggatttctggataccggaatcgactatcaaaatccggtatttcaacatctggataaaaccactcgaatcgcaggcatctgggatcagacgatccaaagcggcacccctccggaatcctttgactatggctctcattatacacccgatatgatcaatgaagcgcttgcctcggaagatccgtattcccttgtcccaagtgtggacaataatggacacggaacatttctcgcaagtatcgctgccggttccggagatcccgatgcgcagtttatcggtgctgcgccggaatctgtaattgccgttgtaaagttaaagcaggcaaaacaatatctgagagactactattttattcccaatacagcccctgcttttcaggaaaatgatatcatgcttggtatgcgctatctccacctgcttgccgaaaaactgggacttcctctgatcttctgcctggcacttggcagcaatctgggcggacactccggctctctcccactctcgatcattgcccagcagtataccttgttgtctaatcggattcctgttatcggggtcggaaatgaagcagatcagagacatcacttttacagcgagatcatgaatacttctgatacaaagaccgtagaaatccgtgtcggagaaaatactagcggttttgtgatggagctatggaccgaactccccaatatcctctccatcagcctgacctctccgtctggggagagtacgtcccgcattcccattcgtgcgggaacaagcacaactttcaattttctttttgaaaatacaacagtctacatcgactaccgtctgtttgtagaaagtacagcctcggaactgattcattttcgtttttccgatgctgctcccggaatctggaagcttgtggtagaacccgtccagattattgacgggcgattccacatctggcttcctgtgcgggaatttttaagcggagaagtttattttttaaactccaatccatactatacactgactgccccttctgattccgtacagccgatctccgtctcctattacgattcttccaacaacggtcttgcactttcctccggaagagggtttactcgtacggagcaggtcaaaccggattttacagccccgggaatcagcattaccggtgctcttcccggcggacagtttgagagcaggagcggttccagtacctcggtcggcatcactgcaggcgcagccgctttgcttgtggaatggcaccttcagcagaaaaagatcccatccgtgagtaccgctttgatcaaaagtctgctgacgttaggcgccaccagaaacccggatatgaaatatccgaaccgagagtggggatacggccagttaaacctttacaatacattcgaagctatgcgtcagttataacaaaaagggacgccttctcgcgtccctgaaaaaatcattctctctttttggattcgtaaattgtctttacacgctctgattccggtacgatctgttccggtaccggagccgtgcccggtgcaaataccaccttcaaaaagactggtgtaataattgtcgtgatcacgacaacaataatgatcggacctaaaaatgcagaacctaacagccccagtgctgcgcccttgctggctacgatcaacgctacttctccacgcgagatcataccaattccgattcgttttgcctgataattcttgtaatgacagatctttgcaccaaatccacatccaacgaccttcgtcaatactgcaacaatcgtcaatgctactgcaaatccaacgatcgccgcagacatcttcggcagctctactttcagcccgatacttgcaaaaaataccggcgataaaagcagataagacagtgtatcaaattttgtctccagataagtagaacgctgtacgtttgaaatgatcagaccggcaataaacgcacccgtaatatctgccactccaaaaatatcctctgcaatgtatgccatcagaagacagaacacaaatgccacgatcgtgtgtcgatgtttctccttattggctttgtccacccagttcttgtacaatttgtagaagatgaatcctacaactgctgcaaatacaaagaacccaacaatcttcagcatgaccattccaattttcacgcttggatctgaaatgcttgtcacgattgtcaacgccacaattcccagaatatcatcaatgatcgctgctcccaggattgcattgccggaacgggttttgagctttccaagctcttttaatgtctccaccgtaatactgactgaagttgctgtcagaattactccgataaaaatattctgcaggaaaatacttgctgatgcatctgactcgatcatccccggccgattgaacaaatatgccgtagcaaatccacccgcaagcggtaccagtactccacagagtgcaataataaaggatgcctttccgcatgctttaagttctttgatatctgtctccatacctgcacagaacatcagaacgaccacaccaatctccgctacagactgcagaaatgatgtctctgtcagaatgccgactccggcaggtcccaacagtaatccggccagaagcgcgccaacgacctgcggcatctgtacccttcttgtcaaaagccccagcgcttttgtacaaagtaaaataattgcgagatctagtaaatacttgtagtccataatgtgccccctttttgtcaaacatctataaggatacacctttaaattccttttttcaatacattttctacattttatgacgtttttacataatttttaccataattctgcacaaatccacaacaaaaagagagtctgtttccagactctctcataatctttctgttcctacggcaatctcggcacttcctgtccccgaagactgatcagaggaccgccggttccttctatgtaagatcttgtgatcgtcacctctccgatgttctcatcctttggaatctcatacatgatatccagcataaattcttcgataatcgcccgcagtgctcttgctccggtctctttcttcatcgccttctccgcaatcgattccagtgctccatcatcaaaatccagcttgacttcatccagtgcaagcagcttctgatactgctttaagatggcattctttggttcttttaagatccttacatacatatcctggtccagacctttcagtgtaaagatgatcggaagacgtccgataaattccgggatcataccaaaattgcgcagatcttccaccgttactttagacaggatgtccttgtcattgtcatactgatcttttagctctgcgttaaatcccatggatgtcttatgcatcagacgttccttgatgatgccttccagatccgggaatgcacccccgcagataaacagaatattcttcgtatttactgtcgttagaggaaccatggcattcttgctgttagctcctaccggaacctctacctcactgccttccaacagctttaagagtccctgctgtacggactctccgcttacatctctctggctggaatttctctttttcgcgatcttgtctatctcatcgataaagatgatcccctgctcggctttctctacatcattatctgccgctgccagtaatttagatacgacgctctcaatatcatccccgatataaccagcctcggtcagggaagtggaatctgtgatcgcaagcggtacatccaacagtcttgcaagtgtctttacaaggtatgtctttccacttcctgtcggtccgatcatcagcatattggacttttcgatttcaatatcatcgaccgaatctgtcgctactctcttatagtggttgtaaacggcaacagccatcgctttcttggcatactcctgccccaccacatactcatccaactttcctttgatcttgtgcggcgccggaatattcttaatatccagtttttggaactcttttggcttttcttttttctttttgatcttctgtgtctttggcggagccatattctccagatctgacagatttaagaactgtacccccggcatattcatcagtctgctataatcaatcgagccgtttgtcatagcatcaaaacttttctgcatacaatccggacacaccgtaatatggttcggcagatcgatcatctttcccgtcacgctctccggacgatggcagataaagcagatcttctcatactcatcctcgtgttcctcttttacagaagtctgagagacttcctttttctctatatcgggagactcttttccttctgtcgtgaccggagtctccttttcttcatctatgataataaaatcgttatctgacatgttctttcccttctttccagttacttgccctttgtacattcaccgaggtatgtccacattataatacagaataccggcagttacaaattaactttttctaaaccgtccctgtttccagcatttccagaaactgtgcttcagaaataatcggaacgttcagctctttcgcctttttattcttggaagaagcagactgcacatcattattgatcaaataattcgtctttcccgtcacgcttcctgtcactttaccgcctctggattcaatgatttctttcacttcccggcggtttgcaaagtgttctacgcttcctgtgatcacaaaattcatattttcaaaaatctgtgcgctttcctctccttcttctttctgaagcttaacctcctctaagaggcgtttgaaaagatctctgtgcgtttcatctgaaaaataatccacaaacgttctggcgatcacttcgcctactccctgaatgtcgaccagttcttccacggtcgcctgcatcatcctcttcggatcattgtcaaatgcacggcagatcatttttgcattggagagtccgatatttgcgattccaaggctgtagattactttcggcatggtcgtacttctggagttttccacacttgataccagctttgcataggatttttccccaaatccttccagtgttttgatcgtctctgcgtatcgatccagatgataaatatctgtaaaatcccggataaatccttctccaataaacttttccagtgttgcctccgagagcccttcaatattcatggcatccctgctaacaaacaatgcaaaagatttcaaatgctttgcctgacactccggattcgtgcagtacaatgtctttgtctcattttccatctgtatctttgtcgcaccaccacagaccggacagacttgcgggatatcttttacaccgcttctggtcagattttctgcaatctgcggaatgatcatgttcgctttatacacctgaatggcatctcctatgccaagctccagatcttccataatactgatattatgcacactggcacggcttaccgtagttccttccagctctaccggttcaaaaatcgctacgggattgatcaggcctgtccttgacggactccactcaatctccagaagtgtcgtctctctgatctcatccgcccatttaaaggcataggaatcccgcgggaatttagccgttgttccaagagactgaccataggcaatatcatcatataccaataccagtccgtcagacgggaaatcattgcgcacaatctgctccgaaaaccatgcaacttcctcttcgatagatgcacggtcagtaagatgatgctcgaccacctcaaatccttgtttttccagccagtttaactgctgcattctcgaattttcaaactctgcaccatctgcttttaccagtgtaaacgcaaaaaacttcacatttcttctcgctgtgatcgcattgttcagctgacgcaccgaaccactgcacagattcctcggattcttatatcttgcatctacatcctcaatctgctcgttgatacgctcaaaatctttatatccgatcacggcctccccacgcaggatcagttctccctgatacgggatctgaagaggaagattgcgaaataccttcgcattgttggtgatgacttctcccacctctccgtttcctcttgtgactgctttttgaagccgcccgttctgatatgtcagaacgatcgtcagtccgtccatcttccaggagatcacggccttttgctcccctaaaaatgatttcagctgttccacgtcttttgtcttatccagtgagagcatcggtttttcatgccgctccttcggcagctcacttagcacctcatatcccacattaaccgtaggactggatgcaagagtcgtccccagctcccgctccagtccttccagttcgtcatataatctgtcatactcatagttgctcatgatctccgtgtcttcctgctcatatgcacgtctggcacggttcagaagttctacaagttcttgcattcttttcttttttgcttccatatttagagtccctttactttttatatcacagtttcattggaagaatccctaatctcatcatacaattcgttcaattctgcatccgtcagcttcctgtattctccctctttcagacgccccagatggatattcatgatcctcacccggatcagctctctcacctgatatccaagtgcctcacacatcctgcgtatctggcggttcagcccctgtgtcaaaatgatcgaaaacgtatattttccgattttttctattttacacggacgtgtcaccgtatctaagatcggtacaccggatgccattttttccagaaactcctgcgtgatttctttatccaccgtcaccttatactctttctcatgccggtttcccgcacgcatcatcttattgatgatatcaccattgttggtcatcagaagcagtcccttagagtctttatccagacgccctacatacgtgatccggatcgggtaatccagaaaacgcacaatactgtttctttccctgcgctcttctgtacagacgattcccgtcggtttgttcactgccagcacgaccatctcatcctgctttgaaactactttctttccgacttttacgacctgccccggaacaatcttcattccggtctgtgcacgctttccgtccacactcacccggccgctctcaatcagcctgtccgcttctctgcgggaacacaccccagcttcgcttaaatatttattcaggcgaacctcttccttcgtcttttgatattcctgcaaaatccgattattcactgctcaataccccgcttatattattgtcctgtaaaaatatgttggcactgtataaaaacaatgtatctgtaatttcatacgtatccataatatccccgatcgtaccggaataatacctcggatctaccatcacgatctcccggaaatacggtgtaaggaacggaacaaatgaattcgcataagaatctttgatcagtaaaagtcttcgattgctctccgataccgtgcggatatccactacagaaaagttgcctcccaggtacactgcatatttatctctgctgtttaatttcgatgaatcatacaaagacgctgttttcttctgctcatccacatagttgacgacaacatcattgtcttctgtctttggtacataaatatcaatctgctctttctcattcagacggcatccgctcttagatgccaatgaaccattaaaatccgttgtgatcggataagaagcatattctgtctcttgttcttccaggttcaatgtcctggctgcttcctgaaaaacgtagtatgccccttttgccgtccagtgatggtctgttttataataaatcttctcatcactgtgtctggtcaatggctttaccgcatcgatccactgtacactgtcccccagttcttttttcacctgtgcgatatactggctctgattggcaactgtagcggtaaacggaagcctgtcacttaaaatattcgccgcatccggaactaacagcatattcaccggaatatcagaatatttctgactaaaactctggatggctttcatatttgctttcaatacatcctgatccggaactgcaatgtcttccagcagctgtccttttttcccgataaaaacaccattttcctctttacttcctgccagtctgctaaatccgactttcagactgcgccacatatttcttcccataaactgatcgacctgatacttctcatactgatccatatagctcccggaagtaaccgcgctgactgaaagctccggcttttgctgtaatccgcggttttcctcttctgagattttttttgacggaaggagcagattgatgatcccgatcccgaatacacagataaggaatccgattccgatcacatattcgattctttttcttttccttgtttttcttctttctgacatatgctcacctaaaatctaaaatataaaaacggattaaatgactgtgtcaccagaaatgccagcgaaagtgcaaacatgaccagatacatcacacctgtcattgtatattttccaactctgcttccaggagccctctgaatatttctcatcagtctgtatccaatggaggaggatcccaacactgccatcagatagatcagccagttggagagcagataaaaccagctcagcttgtccataagcccgctggcaccgattccaaacatcacacctacatacttcagggcataaccaagtgacgggctaaagaacagtacccatccgatcagtatcagcaccatcgcataaatatgccgtactgcacccggccacttttccacatattgtccccatacaaatttttccagaatcaatataattccataatacagtccccatgcgacaaaattccatgccgcaccatgccagaatccggtcagcatccagacgatcagaagattggtgatcgttctggagtctcctttgcggtttcctcccagtggaatatacacatactcacggaaccaggtactcagagatatatgccatcttctccagaattctgtcacactcgtagatacatacgggtaatggaagttctccaaaaactcaaatccgaacatctttccaagaccgatcgccatatccgaatatccgccgaaatcaaaataaatctggaatgcataagaaatacatccgatccacgcagtcatcaccgaatagctgcccagatgcatcgctgcgatctgctcaaaaaccgctcctgtcgtatttgcaagaattacctttttggcaagtccccgcataaaatacatggctccctgtccgaacttggtcacgttcatagatctgtgctccaactgctcctcaatatccacataccgcacgatcggtcctgcgatcagctgcgggaacatagaaatataaagtgcaaaatacatcagctttttctgcggctttacctccccccgatatacatcgataatgtaggaaagcgcctgaaatgtataaaaagaaatcccgatcggaagcggcagttctctgtatggaatatcaaacggaagaactgcattcacggattccatcaaaaagccgtaatatttgaaaaagccaagaagcagcaggtttacaaccaccgcaaaaatcagactgtttcgtttttttctgtcatcatctgccttttcggcaatatccagaccgcacacatagttcagacaaatggatagaatcatcaaaatgacataaacaggctctccccatgcataaaagaaaaggcttgcgatcagcatgaccagattcttgaaccgatacggaacaagaaaatatactgccagtacaatcggcagaaatacaaataaaaatgttatactgctaaacagcatcttttgttccccctgcgtttctataaactttttgaaaaaacagacttataagtctctgcttttggagagactgcgtaaaatacgaacttccctcttacagaaatctgagcttcatccaaaagctgcacctggtcaggcgcataaccgtcaaagtcattccttctgttcgcacggcgctgttctacagctgcctttacctcttctgcctgttccgtggtctttgttttgaccagtaagatctcctgtgctgacatactggattctgccgtgtagagcattacaccttcataatctgcactgttgagcccataataacgcttcagcccctgcactcctgcttttttcatagccttcgtatccagagatacctctacttttttctctaccgcagcaaagctcttcgtactgccgctggtgaaaatcaataacagtgccacgtaaacaacgatcactgccaccagtgcatacttgatcaccactgtttttttgagattttttatcttatctgtcataaagttgctacctccgccatacgtttgagccagattggataaaaatccgccttgaaatgaattccatcctcttcataataagtatctgaaaccagcgaagtattatctaaaaatgcaatctgattctcatcacacatcttctgcagtgccgcattgtactccggaatcttctgaaatacaggcttttcttcctgcttcgccgcactgaccgggaagatagaattcacatacaaagttgtatccggcaattttttacgcagctggtcgatcactgctttatactctttgataaataaatccgtatccccatttgttgcaatcacgtcattcatcccataggaaagaaaaataacctgagggttaatgtctgccactgtttttatctgatcatccagctcatccaattctactccgatcttggcaaccacactggatgcattcaaaagatcatactctgtaaatgcctcagaaatcgaatctcccatcacgaccgaactggaaaataagctcttatagttgatctcaccacttgcttcctgactttccagcttgtctttcgtgtccagcttgttgatctttttttcaatatcttttacattttctttttctgtcgcttttatgatcgcaagtccctccttcgtatccactgtttcagcggaaaaatagctgattccttccgcgatcagggtaactgcagcaagcactgcgactgcaccggctccgattatcacatgtttttttttctgtctcttcatccgtatcttttgtccccttattcttaccatcttatcttattttataatacgttttccatgcttaaaagtcaacgttcctgatgatagattctctcgctgatctcttgcattttcatgtcgatcgtatggagctgttctgcgcagattcccagatcttctgaaacagaatccggaaatccgtccgtctgtttcttataatacagtttatgttctatacttgcccaaaaatccatcgcgatcgtacgcatctgcacttctaccttcatcggttttttctcattcataaaaaataccggtacttccaaaatcagatgcagacttctgtaaccgtttggttttggattcttgatatagtcctttctctcgatcagtctgatatcatcctgctcacatatttttttcgcaagcgtatagatatctttcggaaaacagcagatcacacggatacctgcaatatcacagatattttcttctatggcctgtacactgatctctatattttttcttttcatcttctccaggatactaatcggtttcttgattctgctttcaattgataagattggattctgatcagaattgatcgataattcgtgattcaacacttcaaattttgtcttaacttccagcagtgcacactgatactgcatgatcagcttctgaaacggcatcgctgattctaaaagcctctccggttctttcaactctgtcaattcttcaaatttcatttcttccatattaactgcccttctcttctgtactgattccatataaaataatatccaataactctgatatcttcagattatgttcttctataaatcgggaaaaatctcctgtacggcttgctttattctggtaatatccattgtacatattctgaaacagactcagatattctactgccatttccatactgattccctctcttaaacgaatcttggacagcaaatgccggtattgctctcttatataggcatcatatctttccatcacaccaaaaagtgcttcttttaaatgctctgccggatataacatcacattaaaaaatatatttctgtcatacggattttcagcaaaaaacacttcccgtctctccaaaaaaatacggatttcttcccttgctgtctttgcctcttctttcccttcctccagataactcatcaacttttcgaagcttttcttcacacagtacagatatagctcatctttatttttaaaattatggtagatcagcccttttgcaatctgatacttaccgcatatcgcattcagcgaaaccgcatcgtaagatctgcttccaaactcgatcgtagctgcatgtacaattttttcacaagtctgttttgtcttttcttcttttttcatgctgttatcctttctttttgactatacagtctataataggatactatacaattttcttacaatcaatatttttgcctgtgtttttttctcttttttatggtatgatagagaaatcaatacttatattttttatcaggaggacatccttatgatcgcgttaaaactgacgaatgtcaaagcctgtatgtctcatcttcttctgatggacaccttcgattcattccttctgatcgaaggagagatcatgacattcaatacgttcaaaatagacggttttattcaaaaaaacttttatacttctgaagaactggaacaaatgggcacactccctgaatacgcttactggaagcagcttcgggaatactgcttctccctgatcaaagggaaaaagactccgcttggatttcgttttgtattcagtctgtctccgaaaaatattgcccgccttatcgagcagaatgaactcggcctgaatgtcgatgacatccagggactctatttgaatctccgctatgattccaccggacttcaatgcattaccggtacatctttcaaatccttctccatggacaagtcgctggaacacacctgggacaacatggtacagaagtttttccagaaaaaaggactggatttcgaaattttgtaatctgtaattttagttcaacgaataccattatataagacagatccacattttaatcttaaaaattatgaaagtttttcttaagattacaaagtgattttattgcctttttcgtaaatgacatctacggtttcatcaactggcatcggatgggacaaagacagggaagcgaagctttctaaacaatataaaagggagtccgaaaaagaaatggttctaatccctttctttttcggactccctatatttttttattttgtcaaaagcatcataatctgattacttctctgtacaaatgctgtcatctcttgtggactcagtggtttgtgggcaagcagcgccagatcatacagctgcttacagatcagctctacattctcaccttctttgttctctaccacatactgcaccagtggatgatctgcattcaggatcaaggacgcctgtccgccgaacataccggtatccataccacccattccatacatcttcatcatctcttccatacgtctagactcttcagacaacacggccatggaagcaatattctcatcttttaatttttctactttgacatccagtttctcattattcagcacttttctgaagatttctgtcagactgtctgcattcttctggaatgtctctttttcttcttctgcaacttctgctttcagagactcatgaacatctgcatcgattctctggaattttacattgtcatgcttctgctccagataggtaatgaatgcagaatcaatattatgtgccaggatcactgcatcctgcccctgctctttgaacatattgatgtactgactctgctgctgttcattcgtcacgtagaaaatattagtctttggtgtctcttttgtctcttctgaatccgttgtctcctctgcctttgtctcttctgctgtttctccgccattggccttgatacagtcttccagagtgagatatttgtggtcaagattcttaaacagcatcgaatcttttactttttctccgaatttttcatctttcaaacatccaaacttgataaacggactgatatcatcccagtatttttcataattttctctgtctgttttgaacataccgttcagtttgtctgcaaccttcttagaaatatagtctgcaacttttgttacaaatccatcattctgcagtgcacttctggatacattcagaggcagatccggacagtcgatcacgccttttaacaccatcaaaaattccggaatcacttctttgatgttatctgcaataaatacctgattgttatacagtttgatctttccttcaatggaatcatactctgtattgatcttcgggaagtacaggattcctttcagattaaacggataatccatattcaggtgaatccagaacagtggctccttgtaatccataaatacttttctgtagaactcgatataatcatcctttgtgcagtcacttggattttttgtccagagtggatgaatatcgcttaaggaaaccggacgttttacaattttagctttctgtttcggctcaccttcttcaccttcttttggctcttctgtgatatgttctaccacttcatccgtatccagaacatctgcctcatcgattgtctcatactccggctctgcattggccttggagaggaaaatctctaccggcatgaatgagcagtatttttccagcacttctcttgcgcggtattcatttgcaaatgcaagactgtcctcgttcagatataatgtgatctctgtaccaacttctgtacggtttccttcctgcatctcatactctgtaccgccttcacttacccagtgtactgcggctgcaccctctttataagacagcgtatcaatctgcacttcgtccgctaccataaacgcagaatagaatcccagaccaaaatgtccgatcatttcatcctctgtcgtcttgtctttatatttctccaaaaactgtgtagcaccggaaaatgcgatctgtgtaatatactcttccacttcttctgctgtcataccgatcccgttgtcaatgaacttcagcgtcttttcttccggattgacaatgacctgaatctttcctttataatcatcgggaagctcacactcacccatcatatccagctttttatattttgtgatcgcatcgcatccgttggacactaattcacgaatgaaaatatcatggtcagaatatacccattttttaatgatcggaaatatattctcgctgtcgatagataaattacctttttttgttcccatatctaaacactcctctttctttacaaactcacccgtcctgcgggttttcttctgtctatgaagtattttagtacaccatgttttaaaagtcaacagaaaattagcactcttttcagttgagtgctaataaaattatgaactctataaactttttataaacaagaaacaaatacaaaatactcctgtcaagtggtataatcaattctgtcagcttattcactctttccaaagaaaaggaggttttcaaaatggaacagaatttttcacttactccggtgcatactgacaaacagattcaggaaatttccaatcttgcttctgttatctggcatgagcacttcactcccattatcggcatacagcaggtagaatatatgctggaaaaatttcagtcttttcatgccctgaaagaacagatggaaaccggatatgaatattttcagatttttgacaatacagagttttgcgggtactgcgggattcatcaagaagaaactacactgtttctaagcaaactctatttaaaaaaagaggcgcgaaaccgacacctctctacaaaaacgatccagtatttaaaaactctctgtcaaaaacgcggtctctcttccatctggcttacgtgcaacaaatacaatacgaatacccttgcggtctatcatcatcttggatttgagacggttcgttcacaggtagcggatattggaaacggatatgtcatggacgattatatcctggaatgcagaccgtactctgcatttttcttttgtctattctttataaaactctccataatcagtagaaccaattttctcactcggctcaagcgtaacggccgcccctgttgtctgtatttctgttccttttggaatcggtacattctcataactgaggtccaattcttttggtgcaaacgaaatcacctctactctgcgttcttcatctgctgcaaattctgataaaaatgaatccggaagtgtcatcataagatcattccagtccggttcagacttcacattataaagcccctctggaaaatcacgccccgcagtcattgtctgtcctacttctactcgcactgaatcctgcagtggatttgtctctccatgaagcctttctgtctgcgcacaatccgaacggaattgaagtgctgccccgcttttcacttccaaaagagctccatcgtataaacgcagatcatccatcacagctgcctgattcggattttcagggtcatttccaatctgttgccagatgtaaattccattctcatcatcgatcaaataaatcgcactttccccatcctgcgcctctactgtataaattccctctggaatatgaacgccaacctcataatatcctccggtaagaacttcatcgtatgcttcgcctgtctcagaaagctgtctctttgcaaactgatattcatcatattcctctcccgactgactctgccccttctcttgttcctcgaaataactgttcagtgcaacggcaccaactgctgccacaagcaggattacgcttccgatcgccagacccttcccgatcttctgcaccgcatcacgcggctgtgaatcctgcatctttacgctttcattaagatgatagactttctttgtgtttttttcattatcaagcccgcattccacgcaccgtccgtttaccagttttccaccacacagataacatctctttcccccaagcataagccctcccattcctgctgctttttcagctttgcagacacatcatttcctgttatcatttactttttacaacatccagcgccttctgcagctgattgtcactggtcggattcgccgcatcgtaggtatattctacctccacatccggctgaattccttttttatggatgttttctccactcggtgtaaaatactccgccgtcgtgatcttgatcatcgtatcatcctcaaaactaaataattcctgcacgattccctttccgtacgtcgtggttcccacaagggtaccaattccgtagtcttttacggcaccggcaaaaatctctgacgcgctggcactgtagccatttacaagcactgccaatggtttctgaaattcatgctttccatcgcagtcgtaggtttcttcattcccgtatttgtctttaacagaaacgattcttccttccggaaggatcagtttcagcatctctacaacagtatccatgtttcctcccggattattccgaagatcgataacaagtccttccatcccctgagcttccaaatcttccagtgcggatttgaactgttcgtaagtcacatcttcaaatccctgcacagaaatatatccaatcttatcttccttcatctcatgttcgactgtctgtgactgaattttttctctcacagctgtcagcgtgtgctcttcccggtcttctcctcgataaacggagagtttcacctctgttccttcttcacctttaatccaggatacaacctcagacgtatcctgatcttcaatcttatggtcatcgacctgatacaggatatctccttctaaaagccctgccttttctgccggactgtcttcatagaccgttgtaatcgtgatctccctggtctgtacattctgcatcatagcggctccgatccccgaatattctcccgaggtgctctctttgatctcttttgtctcttcctcattgtaatataccgtatacggatcattgagtgcactcaaaaatccggcatacactgcatcttccagatcctcctgctttacatcatcactgtagagataatactgatcgatcattttttcaatttttttaaattttgcttcggtctttttctctgcccgctcctgcttggcagtcacgctgtccttttgcaaaagcaatccggaaagctccggtacctttgtgcagactcctactgcaaataacataataagggcgcctgtgagcgccccttttataaaacttttatgtctgttcatactctgttaccaactttcggtattttagaaatactgatccggactgactgcaactccatttaactctacctggaaatgcagatgtggtcctgtagactgtcctgtagaaccaaccgcaccaatctgctggcctctttccacatactgtcccgcacttacacaaatactgctgtggtgcatatattttgtcaccagaccgtttccgtgatcgataactacccagttaccggcgctgctgctgtatccggcgatgatcacacgaccggctgccgcggcatatgtaggtgttccggtcggcgcagcataatcgtttcctttgtgtccgccgacttcaaactcacggatttctccaaaataactggactggtaactcattcccggacacggatgtgtgaaataaccacttccgctggatacattgccggatgacggaggtgtcactgtggaaccgcctcctgtaccactgcctgtattattattggaattattctgattctgctgctcttgctgctgtaactgctgctgtcttgctgcctcagccgcttcttcctggcgtctcttctcttcctccaccagcttctgcagtgtctccatcttgctgccgagctgactgcttaaatctgccagctgaacatccttttcttttaacaatgtctgcgcctgtgtctgctggttcacaagatccgtctgaagtgtatttaattcctcatactctttctgcagcgccgcttcctgctcttccactgcctttactgtcttctggaattcttttaacttatctctatcatattcagacagcttggaaatatactctgttttattcaaaaaatcactgatattttcactgtcagcaagaacttcaataaattccatatttccattctcgtacatatatttgatgcggatcttcatactctggtactgtgtattttcttctactttagcctgcaccagattttcttctgcttctgtgatctccgcctgctttgcatccagcttggactgtgtcttttccatctcttctgcaatctttttcaactctgtctcaacagtcgtcttctctgcctgcacactgtctttttgctgctgcagctgatctactgcattctgtgcatcctgtacagtctccgcatgtaccggaagtaccgttccgacagaaagcgccgctgccagacataatgctgtcacttttttcatacgttctttcatatgttcacctatactttcaaatgcttgcgtactgtaaagaaacttcccaggaatccgattcctactccaagcagaagtccaattggaagcaggtagcgatatacatctcctaccggcaggaattccacgatatttttcaggatctggaattttgtcatcacatatcccactgctcttccataaagtgcatacaataatgccaatggaagtacggctccgatgattccgatgatcagaccttccagcacaaatggagaacgtactacaaagtcctttgcaccgatatatttcataattgcaatttcttctttacgaaccgtaatacccatggttacggtattgctgatcaggaagatcgaaactccgaacaggatcaaaatgatcgcgattgacacatatccaaccagtacattgacactggaaagtgtattcgccacaacatctgatttattgacctttctgactccgtccagtccctccgcaaactttaccagttccttctgtgttgcagaaagtgatttgctcttggagatcatattgctgtccttgtcctcctgcggtttcatataaaccgcataactgctggagcctgcaagcggattgtcatccttaaatccatctgccagttccggattgtctccaaagtactcttctttaaaactgttccatgcatcatcttccgaaacatactctactttcagaacatcatccctgctgcgaagctccttgccaatctcctcgatctgactttctgttgcatcctcatcaaaaaatactgtaatcgccacgccttcctctgcagtctttacaaaatgctgcagattcagcacgatagaaaagaacagtccgaacagaaaaatacaagctgacattgtcgcaatagatgcgatagagaacattttatttctcccgatgttcttaactccctgttttcctatgtatcctaatgtactaatcctcatctatatacccacctttttgttcatcactcacgatcacgccctgtttcatcgtaataactcgttcgttcatctcgtttacgatctcctggttatgtgtaacaacaagtactgtcgttcctctgtcattcgcctctttgagaagactcatgatttcccacgaattggtaggatccaggttaccggtcggctcgtcggccaacaaaattgcaggttcatttacgattgctctggcaatcgccactctctgctgctctccaccggaaagctccttcgggaaagctttatatttttgcgccagacctacaagagaaagtgctgccggcacttttcgcttgatcactcttgtcggtgtttctgtcacacgaagtgcaaacgcgatattctcataaatattccggtccttcaacagacggaaatcctgaaagacaaccccgatgcctcttctgtattttgcaatgttccgatgtttcatccgttttaaattctgcccgtttacaataatcgtgccttctgtaggctccagttccttcatgatcagacgaatcaatgtggattttccggaaccgctgtctcctacgataaaaacgaactctccctgttcgatcttaacagacacaccgtttaacgcagcattccctttggaatactctttcgttacatctcttaattcaatcatcatgctcctcctaattattcatactttatcggacgaagtccgcccgccgcaggcatacattgcgggatgcccggatgggtatactttatcggacgtaaatccgcctgcttaatattccagcgtctccatgtatttcatatattttacgaccatcagtgcaatcttgaatgtgatcgcatcttcaaatacacgcagatccaaccctgtacttttctgaagcttatccagtctgtacacgagtgtatttctgtgaatataaagctgtctggatgtctctgatacattgagactgttctcaaagaacttgttgatcgtagtcagtgtctcctcatcaaattcatccggtgatttcccctcaaaaatctctttgataaacatcttgcaaagcgggatcggcagctggtagatcagacgtccgattccaagtgtgctgtatgctacaatgtctttttcatcaaagaagatcttgccgacatccaacgccagttttgcttctttgtaggacttggaaacttccttgatgtcgttgacaaccgttccataggcaatgtggattttgtcatcctcggactcagcccgcaggatctccatcatttctttggccatcttttcaagctctctgcttccgtccttatcagccagctctttgacaacaatgatatttttctcatctactgctgtcacgaagtctctcgactttccgccaagcaggtttctgacattatccagagcaacactgtctttttcgtgtgatgtctcaataataaagataacacgttttgcttctgtgtcaatatgtaatttttttgcgcgattataaatatctacaagaagcaggttgtcaagaagcagatttttgatgaaattatccttgtcaaaacgctccttatatgctaccagaagactctgaacctggaacgctgcgatcttacccagcatgtagacatcttcgctctctccgcctgccagcagaacatactcaagctgctgctcatcaaagatcttgaagaactgacatccctggatcacctggctgtctgccggagattctacaaaagacaacaccgcgctttcataattccatgtatcctcaaatgtcgtagcaagcgcctttccttctgtatccagaacgcaaaagtcaattctggaaattccttttaatccttcgattgtgttttgaagtatctgatttgaaatcataccttttttcctccgcttatctactcgtttccatgtgcatatttcacaatttttttactctttcacttttgtctgcacaacccatattttatatactaaggcaaaacatcaaaaaaagaaagaggaaatccactttttttatgcatttcctcatagtttttacaaaaaattcatattgatacggctatacatagtatacaaaccgaagcttttttattcttcacttctctgctgccgtcccacctggtaacggaacactttcctgcgcagaaatctttgaatctttccttttttctgctttttcatatagatttctttcagaacgctcccgcatccaaaccacactcttgcatttaacaatgcgctgttcctctgtatcaaaagctcctgctccggtgatggaagcagggaaaaaatgcaatctgtctcagcaccattgaccgcattgatcacctgctctattcccgcaccatccggcggcagaacgcctcttcctgccaggatcagctttctgtcatgttcccggatcgcggattccatctctaaaagctctgtttctgactgtgccacaagaaatacacgctttttgtttctctgtatatagcggagaaacatctttaaaaacaccagtcccgccgtatcacgcagcagcgtcttttctctgactcctgccgcctccagaatctccgtctctcccggcagcaccagattcagtgattccactgcttctttccagcccggcatatctttccctttcagcagcatgtccatcgtgatgatctcaactgtgttaatggaatcactttccatatactgcaccactttctgcatcgctgcttttgcactcgtctgatagagttctatattcaagatattgatcttctcattcatctgtctcacctgtacttttttcccagtcgtaaaattgtatcaaaaacaagaagatttgtaaagtattttattctctttgacgataccaggcacctgattgtgttcttcatttacatgttttccactgctgcgcgttcaatcgaaagccctttcgtataacgctccataaagcttcggtaacctgcgacaccttcctcttctggattcaaaacggaaatctcgctgtcttgaaacactgcttctgccagatactgatccagtgttcttccgtttttttcctgcataaaggctgccagaagcgcaattccccatgcgccgccttctcctgcggtctccatcactgccaccggaatctccatggcatcggccataatctgctgtcctgccccttttgtcttaaacagtcctccgtgccccataatccggtctgactgtacgccttcttctctctttaaaatgtccattccggttttaagtgctccaagtgctgtatacaaattgacacgcataaaatttgccagattaaacctggaatccggtgtacgtacaaacattggccttccctcttcaaatcccgtaatatgttctccggataagtatccgtaggaaagcagtccgcctccgtctgcctctccctccattgcctttctgtaaagagttccgtacagttggtttctgtccacatccatccccatcgtctccagaaactctgcaaacagaccgacccacgcattcagatccgaggtacagttattgcagtggaccatggcgaccggatctccggccggtgttgttaccatgtcgatctcacgatgaacacctttcaattcgttttccagtacaagcatggcaaacacagacgttcctgcagatacatttccggtacgaactgtcacactgttcgtcgcagtcattccggttccggcatctccctccggcggacacatcgggattccccctttcaatgtgccggactcatcaagaagtcttgcacctgcttctgtcaaagttcccgccttttctcctgcgcacagcaccttcggaaggatctcttctatcttccacggatattcattctcccgaatcaattcatcaaactgtgacagcatctttggatgatagtccctgatggaagagtcgatcggaaacattcctgccgcatctccgattccaagtactctctctccggtcagtttccagtgaagatatccactcaacgtagtgataaaacgaacttttgaaacatgcggctcctggtttaagactgcctggtacagatgggcaatactccatcgctgcggaatgttgtactgaaacacatcggtaagttcatccgctgcctcttgtgtgatcgtatttctccaggtacgaaatggcaccagaagttctccgttttcatcaaatgccagatagccatgcatcattgcgctgatcccgattgcttttgtcccctccagttccactccataacaggaaccaacctcttctctcagactgcgatagcactctttaagtcctctccagatcatatccagatgataagtccagattccatcctcatactgattctcccagtcatagcttcctgatgcgatcggtgtatggtctgctcctgtcaggactgccttgatccttgtggaaccaaattcaattccaagatatgtctctttgtttctaatctgctctgcaaagttgctttttcccattgccttttctcctcctgcctgaattctcgttctatatggttaatctcatactattctcactatataacaatttttcttcaaatacaacttggcgtatttcctaaatattccctttgatttttgataaaaagttactgttcacagtcactttttgtcaaaaatataaaaagagactctgtctttctcaaacaaaaacaaagcctctcttttttcctttcacactctgactcaggcagggtcttccgcagatttccggcgtctcctggtcatcagaccaccgatacgcccggtttcctttgaagacaaagatttccatccttcctccaaaacctggtccaaaagtcccagttcttctgcaatttcatatttcatcctgtctttttcttccattgacggaatctcttctcgagtgatctttttctgtttcatattcagagcatctccttccttttccagaagtattgccccaaatatctgatttcattcgcctatttctgatccggcatgatcactgacgcaataaaatatgccaaaagaccggttccaacactggcgcagataaacaaaaccattccaagccggatcaaaaccggatccacgttgaaatattccgcgattcctccgcacactccacacaatactctgttttctcttgaacgatataatcttttcggttccatattcttactctcctttcgcaaatgcaatattgacggttcccataccacactcgatgtccatttcttttccggcatgattgttgatattctggtttcctgccggcttcgtaaattcatcatctccaatctgaatgcttcccataccacaactgacactataattataatcggtcatttttccgctatcctgaaactcaatggttccgatcccacattcgagatccagatcactgttcacgcttccttgcagcgagatcgatccggttcctgctgaggcactcacttcccctgcttcaaatccctgaatatccgctgtcccggtccctatggaaatatccaactctccggtcctgatatcacgcatgtacagcgtaccggttcccagggatgtggaaatcccctccagattgtctggaacgtgaataatcagctctcctgcgttgttttttccgatattcttccaaagcctggtatcctgagcacaaatctccagagtatcttcatctctgtaaatcgaaagatcctctaaaagctgcggatccatatttcgggtcgaaacctcgatctgattggaatctgatcgttccatgatcagttctacataagaaagttcaatatccagttcgctgattccttccaaatcttctgttatctccggtgaaacttcttcgtcgatataatccagttcttcatccatctcctccggttctgaatacttctgtgaccaccagtgatcgttttccagatactgcatcccacgccttccatattcctgaagatcccgtactcctccgagaacagtacctgccactgacaggacaactccgatccctgcacagattccacagctgatcagtagaattttccaaccttttttcatctattcagacaccgcctttctgtgaaacggcttccggcacagtttcacgataaaccgaaacatcgccggatacattacaatgcaaagctttccggtaaatactgttgccagtactccaagcgcgatcaggatcaatccgatccctgccatcaaaagcactgcaggtactgaatgaatggcgattcctacgccgatccctgtcactgcgactacaaatccggcaagtacgactgccagcgatgcaatcaccagtgctgcaaaaaaacaaactgctgcaatcagaagcccggcaatcacaccaaaaattcccacaccgaccggaatcacaaccggacatacaatcaacgcaatgagtacgatcaatgcgatctttaccagcttatcattcctgccttgcgatgcctcataagaatactctcctgtctgtccactctggtaggaataaccttttctttgcggcacctctttcttcgatgcccactcctgctcatatccattctctgtaaactcaccgtcatttcccgtatgctttaaatcattcttgatcatagctgccacacgctggggactctccagctcccggatcacttctgcctcgttgtctgctcctgcatcatcaaaatagtcttcatagtactgcagggcttcttctctttcgtctgccggaatatcccctaacagcgcttttagttttgccataaattcctctcggttcatcccgtcactcctccctcaaaaatttcctggatctttctggaataattcttccactctacctggtacaggttcaactgtgccattcccttttctgtcactttataatatctccggttccgcccatcgtactgacggtcatatacttccagacattcgtctttctgcagtcgtctcaacaccggatacaacgtagactctgatacattgatcgcactgcgcacatcctgtgtgatcttatagccatacgtgccttcactctcatgcgagacgaccgccagcacgatcgcatctaaaagtgcagctcctgtattaaataccatccaaccgctccttcctatgctattttctctttaatactgttcttatacctatattatattttatataatatagattgtcaatataatattgtttaagattttctaaagaactctttctattttctaaacgcaaagaagcagcagaacaatctgtgtctgctgcttatcactacctctgccagttccagagcccaacaccaatctgcaggagcaaaatcagtggaacccccagataaaataacggtttccttatcttatgatgaaatacaaacattccggccagtgctcccggagagcctcccgctgccgcaaaaagaagcagtgtcttttccggaatcctccacctgccttttactgctttccatttatcgatcccgaacaccagaaatgccaccgcattggctgccagtaaataaatcagtacataactttccatttaaacgttgatttcctttccaagagcaaatgaataaatgatcttttctttgactgcctttcctgtgatctgtgacagggcgcgggcatagtatgtaagctgtgactggtatctccgaacaagttcatcggccgttcttacccggtctgtcttatagtctaagactacaagtccgtcttcctcttcaaaatacacatctatgattccctgcaccagaagctgtgctctgcattctgtatccggataaatttctcctgaatccacccccagcacaaagggctgctctttgtacaactgttttttctttgccgcctgatgcatccgtttcccgctttcacattgcagaaacttcaggaaatcttccgtttttacagactctgcgatctccggactgatccttccttctgtctgaagatgtttcaaatgttcctccagactttctctggtatattctttttcaaaatcaagaagctccagaaatttgtggtacgcggttcctctgactgctccggatgccgcttcttccgctcctaaaaatctcggaacaagaggcactgcttccggttcctgatataatacctctcctgcctcctcttccatgtaggcccgttttttaagttctgaaactgtaaatttcatctgaaaacgctgttcttccgcaaacggatatgcaaagtccaactgtcttttcagctcttcccggtatccggcatcatgaatctgatttgtatcccagttttccagtacatttcgagtcagttcatccgccgcttcccaggctccctccatctgagccgcgcccagactgtcaacaacggtaattccgatcgaactttctgccggggatgccgcaggaagcagccagtccagatacgaattcgcagaaagaacttcatatggaagaaatgctgttttttcccttgtggaaagtgtttccagctttgtccgtgcatctttgcacactcccgtcagaatgagtttttcctttgctcttgtcattgccacatagagcacccgcatctcttcccctaagttttccactgccacctgtttctggattactttttttaacagtgtcggagcctttgttctctttttcagatcaatcacatccattcccacaccaagctccggatggattacaatactgcccttcacatcctgcgtattgaaaagttttcccatacctgccacgatcacgattggaaattccagccccttgcttttgtggatactcatgatacggactgtatccgcctgttcatctgcaagattcgcctctccataatccacattatattttttgagctgttcaatataccgcacaaaattgaacagtcccttatagctggttccttcataggctgctgcctttgcgaccagcatctgtacatttgccattcgctgtgcaccacccggcatcgccgaaatacacataccgtaccccgttttttctataatctcccacaacagatcatgcatcgctgtatatggaagcatatcccggaattccgacacccggcaaaggaagtttttcagtttttgctgcaggattggttccttctccttttcatcatcagacgcataggcgtgaaccgcttcatagaaaaagagttccggatacgtacttcttatctttgccagttctctcgcatccagccccgcaaacggtgacgtaagtactgccgccagcggcaggtcctgacgctcattgtccagaatctgcagataatccagaagaacactgacttcatacgtttcaaaatatccttctctgcttcccacatgtgcagaaattccttcttctgccagaacctgagcaaacacatctgcccagcctttgatgcttctcgtcaggatcacaatatctttatattgtaccggacggtattcctttgtctttttatccaccacctgcccctgtaaaagcaagagtttgatgcggtctgccactgcccgggcttccagacggcgtgcattgtcctcttcttccagctcctgtgcatctactaaaagaagctctgcccgatttgccgatactccgttttgctccctgctctttggataatcagctcccggataaagtgccgcacggtcatcatactccacaccgcccacacttttgtgcataatctgctcaaacacgtagttcgtggcatccagcacctcctcgcggcttcggaaattccggtccagatcgatccgctgcttctcgctgtctgtctggctgtatgtatcatatttttccataaacagttccggtctggagaggcggaaacggtaaatactctgtttgacatctcctaccataaacacattgtaacttccgcggctcacagtagacacactggtcagaatcgcttcctggatcaggttgctgtcctgatactcgtcgatcatcacttcctcaaactgctcctgatattctctcgccacagcagatggtaccagacttccgtctttttcttctgtcagaatctgcagggcaaactgctccatgtcctgaaaatcaatcacattgcggcttctctttttctctgcaaacagccttgcaaaggttgtcacaagaaagaccagttcttccatggtacttcctgtatttcgcaaatcttctgccagttcctcgggcgtttcgtaaaaacaggtttcctgcagatcttttaccatcttcttggctttttcccgcagcatcttcactgcttctttcttctccggatcaatcgtctcatcctttttggcagaaagccgcttccatgcaatctgattgatcttcccgtaaaatgcttcaaacgtctctgccttttccatagtctcgatcatcataagatccgcttccaacgcctctgcatacagatacggtccgtcagactcctcacagatatgcagcgcctcattcagcagaatccttgccccctgcaggttctgacggatactttcgatcaggatctgtacaaatccagcgtcagaaaaatgttcgttttccacctgataattgtccacacacacattcagccacttttccggctgtggatagctgcccgcatattcgtataactgcaggatcacttcttccagctgcctgtcacttctccccgtagaaaatttctctgcaaattccagaaaagcctccgttccctcatcatagcaggactccagcatttcctccagaacatcctgacgcagtaatttcaactccccttcttctgcgatccgaaatcccggatccagattaatggcatgaaaatgctcccttatcacagacaggcaaaaactgtggattgttgtgatccgggcgctgtggatgagcgttgcctgcctctgtaaatgcacatttcccggtgtgtcttccagggcattttcaatggcatcccggattcgctctttcatttccgctgctgccgcttcggtaaatgtcacgatcaagagcctgtctacatccagcggatccctctcatccaacagtctctgaatgatccgctctaccagaaccgccgtttttccggaaccggccgctgcggagaccagaatattcctgtttcttaattcaatgacctttttctgatcttctgtccactgtacactcatgacggttcctccctgttttcgatttcttcttccatccggcggatgacttcttctttcgagtacttttccaggctccggtacgcataaccgtccagccttggatcaaacccgcagatatcccggtatgcacagtagtcacaccctgtacttccattcaactcatatggatttgcctgtacttctcctgcatagatctgccgtttcacccgagcttcctttttctttgtataagaaagcattgcagcaaacgcctccggaggcagtactttggaataccggttgagacttccgtccttatttttcccgatcgggttgagaaccgatgtccccgaaagctgatgctccagatgctcgatcacctcttccttcgcattgatcattccatccagcctgagctcttttaaaatcttctcctccagtgcatgatcatctttttctctgtccacgatcgggtctttgatccgataataaaagataccggcaggctctactgtttttcccgatgcacgtcgttcttccagctccagtgccgcattcagatacaccggaagctgcatctgcagcccgtgatacaatgccacaatatcaaaactcttcatcccggtcttgtagtctgtcactttcacgtaaaccacatcttcatcctcgcaggtatcgacccggtcgatctttccacttccgaaattcatttcatatccgctcggttcaaaatcccctttttccatctgcctggtcagcgcccacactgaacgtcggatcagctgtttgatgcgcacgatcatatactcattgcgggcagtactgtagagtaccgtatttccgtagtctttgatactttcctccacactctcctcgatcatggcatctctctgcacctcttccagtttcggccacggcatccgcttttcctgcgcctttcttgcaaaccgctccatggactgatgggcaatatttcccagatccatcgcctcaaactcatatcgctcccgatccgaaagatgcagtccataagtcagaaaatgcgcataggcacaggccgagaaccgctccatccttgtaacactgaactgctttttctccccgtataattctgctgcttcttctcctgtaagcgcatccggtttctttttgaaaaatcctgcatccagaattctgtccactttctgcccttcattctgccgataccaggtatagagttctttccaggattcatccacacccagataccggtcccgaactccgcggatcacaaattccagcccttctcccggagtcagctccctctgtgtcatgagaagcgcctcttcttctgtaacaacaagcttcggaaacagttttttcaaatcccagaccagatacgccggacgcaatgtttttccgtcagacgaaaccttactatatgaaatatgaagaaactcttccggttttgtcagattcatatacagataaaatttctgaatatacgtcttttcttttgcgcccggagaaagtgcttgcttttctttctgaaaccattcccggtcccgttcggtaagcagtcctccctgccccatatttcccggaagcagggtatcattcgcccccacaaaaaacagggctttcagattgcttttcagacgggttctctgcacatctccaatcacaacctgatccatacccggcgggatcacaccgacttttgcctcttccagtcctacatccagaagctcacagtactctttcagagaaatcccctcgtctcccaaaagttctgcaaatttgtcaaacaattccaacacaatgcgatagatctgtgcgtactctttcgccagtgccagctctttcttttccgcaaaacagttttccatcactttcagcttctcctgaatctgattttccacaaagaagcgatacactgcttcacaaatatcgcgcactgtcttttttcgctgtttcaaaacaaagacaagtgactctgtcatttctacaaaccggacgcgcagaccatttagtactgccagctcttcttcatctgtcctatttgtctttctcgcccagactgcctgccatttcttatatcctcttaaacccactgctaccacataattttccagacgatcaatctcatctcttgtaaattccgtaaatccggtccttagaaaacggaacacactctcataggaaaagtcctgctccaccatggacaggacactcctcacatattctacaaatgcattcaaaagaatactctttttgtagtccataaacaccggaatctgatactctgtgcataccctctccagatgatctgcatatgttcccatatcactgcagattactgcaatatcccggtaatggtatcctttttcccgcaccagtctgcggatcttctgtgcagtcagctttgcctccatatccggactgcccgctgcatataccgaaagatgctctgtttcatccagatactgttttctggaatagcggaacagctcagattccagaaagccaagctccggattgctgcgaaaccggtaaaccggcttgtcatacagacagattggatcggcaatttctatttttcgctctcccgcaatctgtaccagacccgtcaccatctgcttactgagtgcaaacaactgatacggatgcgtataccgaaacgcatcctcccttccatccatctcgactgttactaaaacttctttgcaaatgctcatcagctctccaagaagccgattctgcactggtgtaaatccggtaaatccatccagtgcgatcacactgtttttcaaaatctccgactttgccaccatctgactgagcacatccagcagttcttcttttgtaatatatttttctgcaagaaactgctcgaacccctcgtatatcatgcggatatctgacagcttataatatagaaaactttcttcatccagattttccatcagcacatccagctcttcgaatccgactccatactgtgtaaactcagagatcaccgacttgacttcactgatgtatccctgttttttcaagttcccttttaataccctcagacgatcttcgtattgtccggcgattttccgaagaatcagattctttccttcatcatccagaacctgtcctctcgactgtcccacttcctcaaaaatgcggtgtgccattcgtccaaaacttaaaacgtcgatattcataatcccgtgattcgggtgcagcgtacacagatcctgctgcgtctgcatcgtaaactgttccggcacgatgaccagatagtttatttccggatgtttcattgactcctgaatgatcttttcatataaataatgcgattttcccgcacctgaatttcctaaaataaattgaagcatgctgtgtcctttctggtgagttataatacttctattttttgcaacatctcatcaaaacgatccatcaattctttattcggaatggatacgttttcaactcctctccgattccattacttatctcatattgtatcaaacatgcctcacacctgccagtctcaatttttaaaatcagacagcgctcttttatttttgcctttacagatcagctgtgtcatcgttcccatcgggcaatatacgcaccaggaacggggcttaaacaacagcatcgtcacaaatccaagtacggtagaagtcagcatcacactgtaaaatccaaatgcgaactgcgcgattcccggcgaaacattcacgccatgatacgcccagttccacggaagcttccaggtccataacaaggtaactgcctgatgcagactttctactcctgaaaacacaagatacgtcgtccacagcatttgaaaaaacatcgcaaaaaagaaaatcagaaatccataacggaacgctttgcttttcatccatttaggaacatccttcctgcgggataacccaaatctgcctccgatcagctcaaacagctgtcctcttccgcaataacgattgcagtaccccttgttccccttcacaattgcaatgatcagcggaataaaaaagcataacagtcccagccatgcaaatagaatctgaaaaaatcccaacaccagatacatcagagaagcaatccacaaataatcataccaactctttttcattctgccgcctcctgaattgaaataaccgttgccggacacgcttttacacactttccgcagccaacacatttttcctgatccaccactgccatcactccatgaaatatctgaattgccgacatcggacataccttgacacagcatccgcaggcaacacaatccctttcttccacatgggcttttctcttttttcgttttacctgattcataagaatcctcctaaaaataatatagagtcagcagacaaatttgttttctttgtctgctgactctgtcattatataagatacatatgttgttttctgtgatattatcacgcaggcttctactgataccacctcatggactcattcttccagccattcgaaggctgtgtcaaaccatcccgccacatgtggattcagatgttctcctcttaccttcgtctgttcatttgcaagtgacagcccatgacatcctctgtgatacatatggcactccgaatctactccatgcctcaacaatgcctgggcaaacagtaatgcattctctgccggaaccgttccgtctgtattcgtatgccagataaatgtcctcggcgtctgttctgtcacaagattctgcgcaccttgccacgcttcttcaacactgattcttctccgtatgtcatcctctttcggccatcctgccctgaagtcgatcacgggataacacaagatcatggcttgtacctgcatttgtttctggctgtatcctgtcttttttataaaccagtcctgctgataaaatccgctgtaaagcgcacacagatttccgcctgccgaacatcccaggatcgtaatctgctctccgtccacattccatacctcctgatgttccttcacatatgcaaccgctttcgcaagatccatctgcggatatggaagaagacctttcgtttcattctcttccaggactgcatattccagaataaatgcctgataccctcttttcaaaaattccaatgcgatcggttcgctctctctgtctgactgatattcatatccgccacccggacaaatgatcactgccggacgccgacgcgcatggactccttccagattgttctgcacgtaggttgtcagaattgtatcccttgttccgtatccactgtttccaagattgattttttcatgcagcataggtatttctctccttttttctcttctgcaaacattatagacatatctttctgtttctgacaaccatttttgttatcccctcggccaaactctttataaaatagacatgaaccactcaactgtctttggatcatagtgggagaagaataagctctcaccgccatccagtgcttcaattgcagccatatcctccgcggtcagtgtaaaatcaaacacatcgatgttctgtttcatcctttctttgtgaacagatttcgggatgactacaacgtcactctgcagtagaaatcgaagggcagtctgcgctgctggaatacatgagtttcaacctgattgaccgcaggcttgatttctgaaaaatattcaagatcaagatatctgtccggaccaaaattggatacacctatggcacgtatttttccggctttataaaattcttccattgcacgataagttccataataatcgccgaacggctgatggatcagaagcagatccagataatcggtacgcagttttttcagagactcttcaatagaagcttttgctttttcatatcctgcatttgtaatccatacttttgttgtacggcatctttctctcaaacctctctgctgttttagattgaaatcaaagcatagagatcttccgatatgctataagaataaaagatgcggtatcgttccgcttagaaaaccagaaatttttatgcttttctgcattataacacgattatcagaaaagagaaaggtaaaactctctttcgcacattttaaattatacgtccagctccatcacgacatgcaggatcccctcttcatagaaatcatcggatatcgttttaaacccgaatttttcataaaacccgactgcatatttctgtgcatccatgacaattttcttacatttcatattttctttgatcgcctttaaactttgttctaataagtctcttcctgtgccgtttccgtgttgtaaagtcaatactctcccaatcctgacaatatccccatcgttttcctgataaaacgcacgaagatatgcaatcactttcttatcttctgtaaaaaagcagtgcagacttttataatcaatgtcatccatgtcctgataattgatctcttgctccataataaaaatttctgctcttgcttttaatatttcatataattcagttgttgttaattcctgaaactttttcaccgttaatttcattttttcacctgtttcctatagagtcttttctattatctgtttttttgttcacaatcgcaatctttatttttgtaattgttctacgtagaaaaagcagctgaccttccatcaactgctttcttctccaatcatcattcttctgttgttcttacagaagctcaatcactccactcttggacaatgcaccgatatgcttgttcgcaatttctccgtttttgatcacaagcagtgtcggaattgtcatgactccatatttctgtgccagttccatctgctcgtccacattaatctttccgactttgatgtcatctctttcttctgccacttcgtccacgatcggagaaagcatctggcatggtccgcaccagtctgcataaaaatctaccagtaccggtttctctgattttaatacttcctgttcaaaattatcttttgttaattttataattgccattttataaatcctccttcaactttcatatgttcttagtataccacttttttgtgtttcttccgtgacaaaatcacatttctcatatttttttcagagcttttgcatccagtacttctatatagccgcgggataatctcacatacccttctgtctgaaactgcttgagcagtcttgtgacgacttctcttgccgttcccatatctcttgcaagtacatcgtgagtaatagaaaatttctcctctcccgccagtgccatatgttccaggattgccccggccagacgagacgctgcattagaaaatacatactgattgaacagccacatcacatcggaaaagcgctcagataccatctccatcgtgtaatctttcactgcagtgtttgtatcattcagtttcttgtaaatttctttcggaatcgtatacagtaccgtgtccgattccatcatcatatccaacgaaatatccattccctttatcatacaggacgcactcaggatactgacatctccctccaccagacgatacaatgtaatctctccaccgctcggtgacgtaatatagacacggacctgcccttcctttacaatctgtacacctgcgcagtccccgccatcgatgtgaagcaggactcctttttcatattcttccagtgctgtatgggtgagcagcatctgtttttccatttctgtcaggtctttccagaatggcagcacctgaccgatccattcgttcataattcctccgttcatttactgcagataagacactgcaatattgcgcaccttctgtgtcacataactgctgccgccttttgtctttacatcttccaccatgccgaccactgcgatctggtttggcatatcttctgttgtctcacagataaaccagcctcgctccactcctgtcgtatcatcctggctttccttaatctctgcagttcctgtttttccaagcatcgtcactccatcgatcttcgcactggctcctgttccactcggattttcaattaccgagagcagactctgtttcacagtctgtgctgtctgtgcactgactgcctgctctttccagatttttgcagcagcgttttcttcatatttcaaaactggctgaatcatgtttccatcattaacaaacatggaatacatagacagcagatggagcggattaaccagcacctgtccctgcccgtatccggtatcggcaagctgaatttccgaatcaatctttccgtcatcatcaaacgtagatgcctgcatggtaagatcaaatggaagttcttcttcaaatccaaaggattttaatttttcttccatcgtatccgccccgattttcaatgcttcccgtgcaaaatagatattgtccgaatatgtcatggcattgaccagattgaccgtttcaccgtaatctgtcagcgtagttacatgataatctccccagcttgcatctttctgccaggaaagccctacatatcctagattctcatccggattgataattcctgcatccactccgaccgctgctgtgattcccttaaatgtagatcccggaacccaggtgttgacaaaccggttcatcaatggattggatgcatcttcattcagcgcattccatcttgcatctgacatccccagcacaaattcatttggatcatatcccggtgtgctcaccaatgccagcacctctccggttttaggattcatggctgccgccgttcccggatcctgtgcaaactgatcatatgccgtcttctgcacctcggcatcaatggtcacacgcacgtcttttccattctgtgccggctgatatgccagcgtctcgatcgtatttcccgtttcgtctgcaataatgatccgtgtgccgtccaccggacgaagctcttcctcataagcctgctccaggcctgatcttccaatcacactgtttgcgtgatatcctttattttccagtttttccagatcttccgctgtcaccgcctgcacataaccagtcagatgccctgccgcagcgccaagcggatacacgcgatcctgggaatcatttaacatcactccgggaatcgtcagaagctgtgcttctttctcttcatttccctttgcaatcttcttgatcggcacaaaagaatcatcctgtacataggatgcccccagtgcgttttggattgcttcttccgatacatccaatagctctgccagcttctttattgattcggccctggcagtatcatctcccattttccccggcaccagaccaacttccagaaccgttccgtttcctgccagaatcacaccatttctgtcataaatggttcctcgctgggcactttctgtctgaatctgtactttatacgaatcctgaagattcggaaagatcaccgtggaatcccagtcgatcttatactctccgtcctctttttgcagtgtcaccgcattgtcaaaagaaatctcatccgcactggtttccatcgtttctgaatatttcacagtcaccgggctccctttgagtttctccttttcagggatcgagattttgatatcttttacctcgattccttcgtaaatattctgattccgttctgtaaatttcttttttgatattttttctttcgaggattcgctaagcatatcatacatcttgtcatattgcttcttttctacaagtgcaaaataatttttcaccgtttcctgtggtgttgttgtatttatcaacaatttccacgcgaaaactccgcctccagcgagaattacgaccacaccagctgcaataccaccgatcaaaagcccctttttattttttctttttctcatactgccctccgaacatcaatcctgaatcacaagtaacaaaaaaccttgcatgtggtttgccccaatcataccacatccaaggctttttgacactagaaagttcatttctcttattcaaaggtcgggcgtatcgttactgtcgaaaaaacacttttaccatatctgtttcctcttatttctgtccgtagtaggcattcgcaccatgttttctgtaataatgcttatcctgtaattcctgtggagccggcttcacatccggattgatgatctcacagcgtgccgccatctttgcaacctcttctgccactaccgcattatgaactgcttcgtgcgcatccttgccccatgtaaatacgccgtgattcttgcagagaactgccggaactgccagataatccttggcttttctctcaaattcatctgcgatcagaacacctgtattcttctcatatgcttcttcgatttcttcctttgtcaaattccgcacacatggaatctctccgtaaatatagtcagcgtgcgttgttccataacatggaatatctcttcctgcctgtgcccagctggttgcccatgtggaatgtgtatggaccactccgccgatcttcggaaaccgattgtaaagaaccacatgtgtcggcgtatccgaagacggattgtatcttccctccactttatttccattcagatctaccacaaccatatcatccggagtcagtttgtcatattctacaccgcttggcttgatcacaaacaatccgctctcacggtcgatcccgctgacatttccccaggtaaaagtgacaagtccatatttcggaagcagcatattcgcctcatacacttctttttttaactgttccagcatttttcatttcctccccatctacttttcaaacgtatacatctttttccacaaccgctctttcaccgcatcggaggcgaacgccacctcaatggcattttttgtcatctgaacttcctgttctctcgtcactgcataccgctctctgataaatgcaaactccttctctaaagtcgtctggctcaccgtccggttatctgtattgactgtcaccagaagatttgcatttaaaaattcctggatgggatactctgccggatctttgactgctttggtctgcatattgctcagcggacacatttcaatcccgatctgtctgtcccggcaaaatgcgatcgcctctttttgtccgcgaagtgcgatcccatgtccgatcctggatgccccacactgcactgcatccaaaatattctgtacgctgccgcattctcctgcatggatcgtaaatggcatctccagccttctgacttctccgaacaattccataaacaacgacattggaaacgccgcttcgtttcccgccagatctgctgcgcacactccgtttccgaggaactctcttgccgcttttaacatccttcgattggcaccttcactctcatggcgcatggcacacacgatcactccataatcaatgccaaattctgtttttccctgctccattcctttcagaactgcttccagtatccgctctgtagaaaggccttcttgtgtggaaagcagcggggcaaatcttgcttcaatataactgacatgatctagcgctgcgtttttcataaaatcatacccggctcgctccagccctttttctgtctgcagacattccagcggaatttcaaatttttccagatattccgccaagctctggcattccatatctgcctgcagctcttctggttttacacttcttcccagaggctcttcaatacatccctgactcaatgagccatccaggtggcaatgaagatccagtcttggaagtctgttttgttctgtcatatgtttactcctcttttcctaaacttgccggtccaaatcccaatggcaggatctcttccagagtttttgcaaaacatccaccgtttccgtcctccagaacgatctgaaactttttggggtcacaaaattccatcatcacctgacggcatactccacacggcgcacaaagttctccttttttactcccttttgggcctccgacgatcgcaatcgcccgaaattctttcacgccctctgacactgcctgaaaaaatgcagttctttctgcacagtttgtagcactgtatgccgcattttcgatattacatcccagataaaccgttccgttttctgccagaagggcagcgcctacctgaaatccggagtaaggagcatatgatctttcttttccctcatatgccagacggatcaattcctcttttgcttttccatccagatctgttccaaatttaaattcttttttcattgcgcactctccttgcactgctgcacatcctacgccagagtttctccgatcagacgaatcgattctgtgacaagacgcttaaagtcctctgccactctgtctgcagtctcctgtacttctttgtgatccagcttctgcgtggacattcccgctgccagattcgtgatacaggaaattccacacaccttcattcccatgtgtcttgccgccatggcctcacatgctgtgctcattcctgccgcatctcctcccagtgttctgcacattctgatctctgccggtgtctcatagcttggacctgtaaactgcatgtaaacaccttccttaagagcaacacctgtgtttgccccggctttgcggatcacatcctgcaattctttgttatacacttcgctcatatccggaaaacgaactcccaattcttcgatattcggtccgatcagagggctcggaactgctgttgtgatctgatctgtgatcagcatcagatctcccggatgaaagtcaaaattcacaccgcctgctgcgttggtcagcatcacaatctttgctcccagcattcccatcagacgtaccggaagcaccacatcctgcatcgggtatccctcgtaaaaatgcactcttccctgcattgccacaaccgacacaccttctacataaccaaataaaaatcttcccttatgcccggccacagtagaaaccggaaatccttcaatctccgtgtattccattgtctcttctacctgcatggtctctgcataatcccccagaccggatcctaagatcaatgccacttgcggctgaaatttaattttactttttactgcatctgcgcattttactaatttttcataaatcggattcatcttttcttcccctttctatcaatggctcaattaatttggataccagtgcatgaagccgctcatactgcccttcatcaatataaaaggtctttccgctgcggctgatcagcccctgctcttcaaacttttttaccgcacggttcacggtctttacacttaagcccgaatattctgccagttcctgtcttgtatttgtaaatgttaattttccgttttttgcatattttttatagcggtgttcaaaaagaaccgccaaacgatctgttcccggaacaaacatataggtccggctggtcacgccctgttcatacagatactgtcccatgatcttggcttcctgcttcagtgcacggatatccgtccgaagccatctggcatatacatccgccggaatccggatcgaagtacacggtgtaatcgtctgcagtgttgcctgataggtatccagatccatgatcaattccattccccccatggcattgatcccgtcaaactgcatgaaatcataagcaatcccatagactctgtaatctgtaattttaaacattcctcttgcaatgatatgcactgtatccacaggctgattttcccggataaacacaacatttttgtccagttccactacacggaatgactctaacagccagtccggagcatcctgaaaaaactgctcaatagcttcccttctgtcctttttcaactcccgcataaaagggagcacctcatataggcgttctgttcccatacatacccttcctttgtctctggtaaatagtctccttactattataaaacaaatcgccaaaaaaaacagaggttcttctattttcgagaaaaaatttccggctgacatttcaaatctgccagccggatgcatgtacgccattcttatttgataagctctacttttacaacttctgtcggaacacctgtagcgtcctctgctgtctggtcatttccaactttaattgtaccgtcttttaactgtgcatacagttcatcatatttttcctgtgtgaatactttgaatttagaagtttccattggaagttttacaccatcctgagaagcatccagagtcactgtttttcctccctggaagctgtcattgtagtagtcttccagtgcaccgtaaatagaatctccaagattcttcattgcggaagtgatgactgtctcagactctacagactggtcaacgtctacaccgatcatcactttgtctgccgtctctgctgctttcataacagagtttccaactccaccgccacatgcaaagatacactctgttccttcattgtaccatgctgctgcctttgcgttgttttccggagatgcatcaaaatttcctacataagtatatttcattttgatatcccctgctttgagtcccatatcttttgctgctgcatctgctccctgaataaatccatatccgtagcggataactgcaggtaccgcgataccacccataaatccaaggttcttgtacccttcagtcaccgctgcatatccagccagatatccagcctgctcttctgcatacatgatagacattacattatcttcaatctgtacatttccgtctttatccttcggctctgcatctacaagaataaagcttacatccggatactttgtctgtgcctccatgatcggatactcaaacaagaatcccggtgttgcgataactttggctccgccttttacagccagatcgatcgcatttaaacaagcctcatcagacttctctgtcggtttgtaatatttgtgtgtcaggttattgtcttttgcgtatttctccagaccttcccatgttccctggttgaacgatttgtcatcgatcgttccaacgtctgtgatcagcgccagttcataaccgccttttccacctttatctccatctttggaatctgacccttcacttcccggtttctgtacacatcctgtcattccaacaacaagtgttgctgccataagcagacttaagattttctttttcatttcttctcctccttaatatccactggtctgttcgccctgaatcagtttaattgcagagctggtaccaattctatcacatcctgcttccaggaatgcttccatatcagccactgtcttgactccgcccgctgctttcatttttacgtcctgtccgatattctctctaaataaacggatgtcttccagtgttgctccggctgttccaaatccggtagaagtcttgatataatctgctcctgcctcagtcacagccttgcacattgcaatcttttcttcctctgtcagatagcaggtctcaatgatcacttttaagatcttatcgcctgtaatcttcttgagtgccgcaatttctgcctgtaccgcatcgtaatttccatttttcacatcggaaatattcactaccatatctacttcagatgcaccgtcttccagagcctttttcgtctccgccgctttcgcctctgtcacactgtatcccaatggaaaacctaccactgtacagatgttgatcttttctccgtacgtatcatgtacccgcttgatataacacggaggaatacacaccgatgccgtctgatattcgatggcttcctcacacaatttctgaatgtcttcccaagtagcaaatgccttcagctgtgtgtgatccacatggcttaaaatttctttctgatccattttatccgccgcctttcttaaaaatattctacctgttctttggaaacccgcgcataaatcagtttttcttcttctgcccgtgtttctttctgcgtcactgctgacagataacgcttggctgccgcctcaaacaactcctcttttgacgcatacatggttgcaagggactcccctttttccacataatcccctacttttttgtgaataatgataccagcagaaaaatcaatctcactgtcttttgtttctcttccagcacccagcatcgcagatgcaattccacaactctcggtatccataaaggtaatgtatccggattcttctgcgcagacttcgtaagaatatggagcctttgcaaatttatcggtatcccagatcaccgcatcgtctccaccctgtgctctgaccatagccgccagatgctccagtgctctgccattttcaatcacttcttttaccatctctctgcatacttccagagttccttgccccgccaagtataacatattcgatgccaaatgcatacatacttctgtcaaatcttttggtccgtttcctttgagtgtctccactgcctcgatcacttccaggctgtttccgatattatgtcccagcggaatgtccatattggtaatcagggcaaccgtacgttttcctgcattttccccaatggagaccatctcttttgcaagtgccacggaatcttccagtgtcttcataaaagctccgcttccagtcttgacatccaacaggatacagtcgtttccggctgccagctttttactcataatggaaactgcgatcagtggaatactgtccacagtcgctgtcacatcccgaagtgcatacagttttttatctgccggagccagattgccggactgtccgatcacactgactcccgtcttatttactacctcaaaaaattcttctcttgtcagagtcgtccgaagtccgggaatcgattccagtttatctacagttcctccggtatgtcccagaccccgaccggacatttttgccacttttgcaccacatgccgctacaatcggtgcaatgatcagtgtagtcttgtctccgactccaccggtagaatgtttatccaccttagttccttcaatcccggaaagatctaccatatccccggaatgagccactgccagtgtcatggcaagtgtctcttcctctgtcattccctgaaaatacactgtcatcaaaaatgcagacatctgataatcaggaatatttcccgctacgtattcttctatcagatactgaatctcttcgtggtttaaagcttctccgtttctttttttcatgatcaggtcatacattctcattgtcttatccctgcctttcctcgactatctgcttcccttgtcatatgggattccctctgctttcggagcctgtgaattcttggagaagaatgccagaacaaccagtgttgcaatataaggaatcatcttgtatacctcattcggtatgggcagtgttttcaggaatggaatcgtagagtatgcactggagagtgttttcatgattccaaagaagaatgctgccattaaaatcttgttgcttcgccactgtccgaagatcagaaccgcgattgccaaaaatccgtatccggctacacttgcattgaagtttgtagaagtcggaacaacaaagatcagtcctccgattcctccgagtacaccggaaataatcactccggcataacgaattttgtagacgttgactcccacagaatctgctgctcccggatgttctccacaggcgcgcagtcggagtccgaatcttgtgtttttgatcacaaatgcggctatcgcaaaaatcaggattccaatataagtagaaatatagcaattctggaaaaacaaatctccgattaccggaatatctcccaataccggcactttattgatatggaatgtgtccgtaaactggatctgctgcattccctggatcatacgtgctgtaaaaatcgcaaaagccggtgcaaagaggttcagcgccgtaccactgatggtctgatctgctttcatattgatcgaagcaaatgcatgcaaaagactgaacagtcctccggtcagtcccgctaccagcatggcgagcaggaacaatccctgaccacttaatgtcccctggaaaatattgataaagaagatccccgcaaaggctcccataaccatgataccttccagtgcgatattgatcacaccgcttcgttccgaatacattgctccgattgcaacgatcaaaagcggaatggcaaaatacatcgtctgctgtacaacgaaatatgctacattcatgactgtccctccttccctgcacgatctgttcctgattttttctctgcctttttcgcttttctcatctgaaatttataaatcgtatttttaaataacagggaaagcgctccgcagtaaataatcgctgcaataataatatcaatcacttccggtgcgaaatcaaacagctgcatattgtttccgcctactgtgatgtatccaatgaaaagtcctgcaaataaaattccgatcggattggaaagtccgagcagtgcaacggaaattccggagaatccttccggtgcgatcacgtccagtacctgcatatattttccggagtttgccagatataacagtgctccgccgagtccggagagcgcacctgcgatcaccatggaaagtacgatattgcgcttttcattgatacctgcataccggctggcatccggattcattccgcaggctttcagttcgtatccgaaaatcgtcttattcaacagaatgtaaattaagatcacgcatccaatggcgatcaaaattccgacattgatgcttgctcccgggaacagtttatccagtccgcctttcggaagatttgctccctctgctactgccatggactgattctttacctgatcatatacggtattctgaatcagcatattggtcagatacattccgatatagttcatcataatggatgaaattacttcatttacattgaaaaatgcttttaaaagtccaggaaccatgccccagagcgctcctgccagaatcgctgccagaagtgccgccagacaatgaactcccggcgggagaaatgtgaatttgactcccacatataccgctgcaaacgcaccggctgtaaactgtccggacgctccgatattaaacaatccggtcttaaatgcaaatcctacggaaagtcctgtcatgatcagcggtgtcgccatatacagcacctgtccgaatccctgcattccatccgtaaacccaccctgaatgatcatcataaatccgccgaatgcctggcttggattactgatcagaagaatgatcagaccaaacaacagaccgcagacgatcgcaagaatggaggaactgaaattgacaaagccttctcctttaaacaaattcttaatcttcattcttcacactccttttcgctcctgccatgtaaagtccgagttcttctgtcgtaatcttcttcggatccagatctgcaacaatctcaccctcgtacatgacgatgatcctgtcactgacattcatcacctcatccagttccagtgaaacgagaagaactgccttgcctgcgtcccgctgctcaatgagctgtttgtggatgtactcgatcgcacctacgtccagacctcgtaccggctgtactgcaatgacaatttccggattacggtccagctctctggcaataatcgctttctgctgatttcctcccgacatgcctctggcaatactcttctccccctgactggaacggatatcaaatttctcgatcagcattttcgcatactgacgaatcgcatcaaattttaaaaagccgtgattctggaatctcctggtatagtaagactgcagaaccaggttttcctgaagtgtgtaatctaaaaccagtccgtctttgtgacgatcttccggaatatgcgccactccgtccagacatttctgacgaatactctctttggtgatatcctttccatttaagatcacctgtccatgctcgatcggtatcagacctgtgattccatataccagctcagactgtccgtttccgtcaatacctgccacgcagagaatctcgccttttcttacctggaaagatacattgtcaaccgcagcttttccatgatgtctggattttacagtcagattcttcacttccagaaccggttctcccggtgtcatctccggtttgtctacgataaagttgaccttgcgtcccaccatcatctcagacatctgctctttggatgtctctgccacctcgacagttccgatatattttccttttctcagaacactgcatcgatttgcaacttctttgatctcattgagcttatgtgtgataaagataatagattttccttctgcgatcagctgcttcatcaccttcatcagttcactgatttcctgtggtgtcagaactgctgtcggctcgtcaaagatcaggatatcattgtcgcagtagagcatctttaagatctccactctctgctgcattccaactgtgatatccgaaatatacgcatccggatcgatcttgaatttgtacttctcactgagctccattacttttttacgggctgcatccattttcagcacacccatctttgttgtctcacgtcccagaacaatactttccagaactgtgaagttgtgtaccagcttgaagtgctggtgtaccattccgattccaagatcattggcgtcattcgggttgttgatgttcactattttcccattgatgcggatctctccttcctccggctggtacagaccgaagagaacgctcatcagtgttgactttcctgctccattttcaccgagcagcgcgtggatctcgcctttttttacctggagggtgatatcatcgtttgctttgaaatttccaaactgtttggtgatgtggttcatttcaattacatattccacattcgcttcctccctttctcttttatttctttaaaatgtattctttcatacttgttccgtccgtattattttccacattgaaaatatcaaggatcgttgctgcaatatctgcaaaactttctcttgttccgagattcacatcttcccggatactcttgccgtaaacaagaaacggtgtgtgctcccgtgtgtgatccgttcccggaaatcccggatcgcatccgtgatcggcagtgatcatcagaatatcgtcatctctcatccgttccataaaggttcccagctgacggtcaaatgttgtcgccgcctctgcatagcctttcctattgttcctgtgtccgtacaccatgtcaaaatccaccagattcacaaaacagattccgttaaaatctacatcctgtgtctcgatggttttttccattccgtccacattattctggatacgctgtgtatgctggattccttgtcctgcaaaaatatcatagatttttcctacaccatacgtatcatatccggcttttacaagtgcatccagcatcgtgtcttttggcggcagtaaggaaaaatcatgccggttcgcagttctggtaaaattcggtgctgtcccgataaacggtcttgcaatgacacgtccaaccccatgctctcccacaaggatccttcttgcgatctcacagtcccgatacagttcttcgatcggaaccacatcttcatgtgctgcaatctgaaatacactgtccgcagaagtatatacaatcagcgctcctgtctctacatgctcctgcccgtaatcccggatcacgtctgttccggagtacggcttgttgcacagaaccttccttcccgtctcacgctcaaacgcatccagcacttccttcggaaatccatccggatacgtcggaagcggttttggagagatcactccggcaatctcccagtgcccgatcgtcgtatctttccctctggactgctccttcatacgtgcatatgaaccgatagggtgctcttctttctccatccagtccacaccatcgatgttgaaaagcccgatccttttcatgttcggggtatcatactccttcactttggtgatcgtcttcaatgtgtttgctccgacatctccaaaatcagctgcatctgtcatctctccgattccataactgtccagaacaatcagaaaaactcgtttcttttccatttttaatccgcctttcaaatttgccaattccgtcttttctatagttcacattttagacactttttataatcaagaaaaggactggagtccttttttcgcattacacttttattttccctcaatttttctttatatttcaattttttatcgtttaattcgcacaaaaacagcccggcagatcaaatttaaatcaaatccgccaggcagcttctttctttatacattttatattgttttatacctcgtcaattgcttttccaatatcatgacgcatatatttgttttcaaactgcacccactctgttgcagcataggcattggctctcgcttctttgagatcttttccctttgctgtcacaccgagcacacgcccgccgtttgtcacaatctgtccgtcctgaagctttgtgccggcatggaaacagtaatacccttcatgcttgttaaattcttccaacccctgaatcgggaaacctttttcataacttaccggatatccttcggatgccagtaccacgcatactgctgcattgtcttcaaactgcagatctacctgatccagtgttccgtcaatacatgcttccacaacttcaatcaaatcattcttcatacgcggcagtacaacctgcgcttccggatccccgaagcgtgcattgtattccagtaccttcggtccctcttctgtcagcatcagtccaaaaaagatcacgcctttaaactctctaccctctgctgccatagcatccaccgttgcctgataaatgtgttcgctacaaaattcttccacttcttttgtgtagaacgggcttggtgaaaatgttcccattccacctgtgttcaggcctgtatctccatctcccgcacgcttgtgatcctgtgcagaagtcatggtcttaatggtctttccgtctacgaaagaaagaacagaaacctcccggcctgtcataaattcttcgatgaccatctcatttccggctgttccgaacttcttatccagcatgatcgtacgcacgccttcttttgcctcttcaaaattctgacagattaaaacaccttttccaagtgccagtccgtctgctttgagcacgattgggaattttgcagtctccagatatgcgattgctgcatccggatctgtaaaattctcatatgcggctgtcggaatatgatatttcttcatcaggtcctttgaaaacgctttggatccctccaggatcgctgcattctttcttggtccgaatgtgcggataccggctgcttccatctcatccacaagacctcccaccagaggatcatccattcccacaatacaaagatcgatcgatttttcttttgcaaatgcgaccagtttttcaaattccatggcgccgatcggcacacactctgcgaattcttcaatccctgcatttcccggtgcacagtacatcttttctactttgctgctctttgcggcgctggctgcgatcgcatgttctcttccgccgcttccgactattaaaactttcatggcagtctcctcttctactgtgtgatcacagttcttccgtcttttaccgttacttttccattggcgatcagatcgatcgcttccggcagaatcttccattctgcctgctccatcacccggcgctgcaaaatctcaggagtatcatccggctgtgtttctactgctttctgtaacaggatcggaccggtatccgtcccctcatccacaaaatgaaccgttgcaccgactacctttacaccgcgctctagagctgcctcatgtaccttcagtccgtaaaatccttttccacagaaggaagggatcaaagacggatgaatattgatcatacggttgcggtattttgcaatcatctccggcgggatcaccaccaggaatcctgcaagcacgatcagatcaggcgcatatgcatcgactgcttccagaagcttctcattaaagatttctctggattcaaactccttcggcgagatacaacacgccgaaatcccgtgttcttttgcacgttccagcgcatatgcattggcgttattactgatcacaccgacaatttccgcattagtgatcgtaccgtctgccacacgatctatgatcgcctgaaggttggttccgcctccggaaaccatcacgactactcttagcataaagtaactcctttttctccggcttcgatcttacctactacatatggagtatctccggccgctttgattgcttccattgtcttctccacatctgcggcgtctactgccagaaccataccaagtcccatgttgaatgtgttgtacatcatctgttcttcgatatccccttcttttgccagcatatcaaaaatcggaagcaccggataactgtccttttcgatcactgcatgcgttccttctttgagcatacgtggaatattctcatagaatccgccgcctgtaatatggctgcaggctttgactgtcacacccgctgctttgatgctcttgagtgctttgacataaattctagtaggtgctaaaagtgcttcgcccaatgtacatccaagactctcatgatatgtctccagattttcttttgtcatctcaaacacttttctcaccagagagaatccgttgctgtgcacaccggaagacgccatcccgatcagtacatctcctgcttttaagtcttctcctgtgatcatctcttttttatcacagacacctactgcaaatccggccagatcataatcttcctccggcatcagtcccggatgctctgctgtctcaccaccgatcagcgctgcttctgactgcaaacatccttctgcaacaccgcttacgatcgatgcgatcttttccgggtaattctttccacatgcgatgtaatccaggaaaaataatggttctcctcctgcacatgcaatatcattgacacacatcgcaactgcatcgattccgatcgtatcatgcttgtccatgatcattgccagtttgacttttgtaccgcatccgtctgttccggaaagcagtaccggctcttccatctctttgatctttgcaagagaaaacgcaccggaaaatccacccagtccaccgagtacttccggacgcattgttttctttacgtgttctttcataagttccactgatttgtaaccagcctcaatatccacacctgcattcttataatccataactattctccatttcttacatcgtctgtgctctatttttccagatacgcctgatatccgatctcgtccagcttttctgcttttttctgaactgtctctttcatctcttctgaatatgctttgagttttttcaaaacttcctcatctgaggtcgcaagaatctttgctgccagaattgccgcattcatacctccgtcaatcgcaacagtggcaaccggaattcccggcggcatctgaacgatcgaatagagtgcatccattccatccagattctttccggacatcggaactcctactactggcatcgggaaaagtgccgcacacattcccggaagatgtgctgccattcctgctcctgcgatgatcactttgatcccctttccttcggccgcctttgcccagtcaaaaaacacatcaggcatacggtgtgcggaaatgatcgtcatctcgtaatcaattcccagtttttccagcatgtccgcagctttgctcatcaccttaaggtctgaatcactgcccattacaattcctacttttggcatatcttgtccacctttcttaacttttgtgtattccctgtctatttctcaaaagatccgtccggcatctttttgccctcagtcacgaatcttccgtcctccaatagtataatattttttccttcttttgttaatacacttatttcttctaactcttcataaggtgtggttatatctaaaccgtattgattcataagctgaactgatttttcatcaaatatgcgcagacattccttttgttcctccatgtaggaaactgcatcaggaccggcttgtccgcacaacgcttcttccgcccgatctagtcgtattcttcctgtcactctggctgtccactccttctcacgctcatatccgtacttcatcacatccagttttcgctcgatatatttcttatccagaaacagcgcctcatcacatttatgatctgcttcatactgcggatttacattcccatgcagttcgtctcttgcaatcacaccggatgccggaatgcagatgacaggttcgattccctgtttttccaaatctgccagcacagccaaaacaagccgctcaaatcccggacgataaaagatctgtaccactgacttttcagcctggcaatcctctttgcgatatcttcttgtatacgtgtctgctattttccaaagagcctcctcggaaagatttctgaaatattctgccgtttccagttctttctctcccacatattccccgtaagaatacagataccggttatctgaaagatccatttccctgatcctgtcaatgactgattttgtgtacactggatttatggactctctgagatgatctgccagaaatacatcgcagtaatcgcttgcataccagtacacacactctcttaaattcctgtattccggctgttcctgcgcttcaaaacactgatagatctccagaaacaactcatttaagatcgtcagataatccagtctgttcgaaaatgcataaagaatcccgctgcgcaattctgtatacaaaaaactcaggagctgtccatagacttctgaaagcatctttaccgcatatgtcggatcagcaaaactcttcttatagttttcccccagaatatctacatacagctcctgattccatctcttcctctcttccagagtgaaggtttcaaaactgtggtcttctattgttctgcgaagtgattccagtttgagcaaaaaagcggcacacatccggaaatacggccgatacctgtcctgcacagtctcttcctgatcgatcatctgcagtctttctattgagagctggtggcgttccatacatctctcgtttctatcccgctgccatgtttccaatttcatctatgaaagtcctcctaaaaatatcatgatcagaaccagcaataccagcccgttaagtacgattccgagccagcacgtaaaatgtcttttttccggctcctgacgtcccttaaaacctgcccggattccaaaaactgtaaacatcatatcgatcagtcccaatgcacctgtaatatctgccgttttctcacacattgtatacgcatgaagaatcaacaatacaagaacaaacaatgaaaaaatcgcatacatacaagaactttttccctgtcttgcctgtctgattttttctttcttctctttcttctctttcttttccttattttccttattttcctttttttcctttttttctcctgccatcatattttctccttatcccattacagatcaaaaacaatacatatcctaaaattccgccgatcgtattcagtaacagatcatctacgtcaaaacttcccactcttgtcaaaagctgaaatacttccactccgaggctcagtccaaagctatagaacaatgtcatcaaaaagcctctcattctgctggcaacggatataaaaaatccatatggcacaaaaatcaggatatttccaaataaattggtaaataccgcgaaaaacccaagcgtttcccggtattccacaaaacgtctaatctccttgaaaagcacaagattacagcggtattcttcaccaataccgctgcgtccgtaccagtctgagaagatcaggaaatataataagaaaaaaatatagagcacaaataatatttttcccaccgtgcgggttcttttcacctgtctctgattcaaattactcccccgttttccacagctaaaatgtaatctcgctcttatttttcaacagacgtgccccattgacaatggcgataattccggctgtcacgcctgttacgatcgtaatgattccgatcacaatgcttcctgctcctgcctgactcattgttttatatgccttctccatcttctttcactccccgcttactttgcaccatacatttcataatatgcatcaattgccgcttttaatgtatcatcaatgatcacttttcctttatatggtctgttgtagaggtgttctacgacttcttccattgttacgattgctgcggtgtcaaagccatacagctctttcacttcatccaatgcacatttttctccgccttttccgacttccatacggtttaatgacaccatcagtccgacgatctctacatcggcagcaccttttactttcggaactgtctcttccatagattttccggatgttgttacatcctcgatcatcacaacacggtctccgtcttttaatttacttccaaggaaacttcccttgtctgcaccgtgatctttttcttctttgcggtctgaacagtaacgcacttcttttccgtataattcgctgtatgcgattgcagttacaactccaagcgggattcccttataagcaggtccgaataacacatcgaagtcatcgccgtatttgtcatggattgcttttgcataatattctcctaatttctttaactgggaacctgttacataccctcctgcattcataaaaaatggggattttcttccgctttttaatgtaaactctccaaatttcagtacatcgctgtctaccataaactcaataaattcctgtttatactgttccatcttccttaaacctccatatttatggacatctgtatgcccttgtaaatctgttaaatcttctcaattttatcacaaatttcctgcgatttcaatcgaggaactttcaaggcctctgcactgcccccaaaagacgcgcaaagaatctttgacagacactcttatttgccgtattcctctgaccagatataaaaaagccctgtcaagagttgcatcatttacttatactcttgacagaacttcttgtttgtccacgtctttcaaatgttacttgctctaattccatttatattctattgtaagaatttctgcacaataatagtctatatcttgccacaaggcaaccgatttattaaaataagacaaggcactacatgagaatggtaggcggttagtccttcaacagaggttgctgagtgccagtggcactcgtttagcaacgaccgaagcggcagcgtagacctgaaccctctgattacatagaaatcctgcttgcaggaaatctcggaaaggagggcttaacttatgagtgattttgaaatgctctccatcgtactaatgatacttagtattgttgtaacgattttaatagcgtatataaatcaattaaaaaagtaaccgcccttcgcccaaaggattacggttacttttttaagtaaaaaataatttggactaaccaactatcagtagtgcctttttatattcttgtactaacaaatccctattcaaatgtcaaatctgacacacttatttttttgcaatcagtgctggcacaacctctgcgcagatctcagatgccttttcacaattctatcatccaggcgcacttttttgtttttcttattttacgattccaaccatatcctgcacacttgcgaaatgattctgcttcatgtacgcttcaattccatctacgatgtccatggttactgtcggattgtagaaattggctgttccaacagataccgcgcttgctccgactaacagcatctcgatggcatcttccgcactctcgattcctcccattccaatgatcggaacattcactgcattggcagcctcatagaccatgcgtactgcgatcggatgcactgccggaccggagacaccgccggtcttatttgccagcgcaaatgtcttacgattgatatcgatcttcattcctgtcagagtattgatcagagaaatagcatctgccccgccggcttctaccgcttttgccatctctgcgatactggtcacattcggactcagtttcatgatgaccggctgctttgcatattttttcactgcttttgtaatctcttctgccgcctttgggttctggccgaacgcgattccgccttctttgacatttggacaggaaatattgatctccagcatatccacatcctcatttgccagacgttctaccacttcacaataatcttccgcagatcttccgcacacattcacaatgatcttcgtatcaaactgacgcagaaatggaatatcccgctcacaaaatacatcgattcccggattctgcagtccgatggcattcatcattccactgtggatctctgccactcttggggtcggatttcccggccacggcacatttgccactccttttgtagtgactgcgcccagacggttcaggtctacaaattcactgtattcttcccctgatccaaatgttccggatgccactgtcaccggattgttccactctacacctgcaatctttacccgcatatccattacagttccacctccgtcgccaaaaataccggtccgtctttgcagacacgtttgttatgaacatgactgtggtgatccacttctttggactgacagacgcatcccagacatgcgccaactccgcaggccattctttcttccatcgaaatgtaacactcgatcttgttctcttctgcatactgcttgatggcacgcagcatcggagtcggtccgcaggcatagatcacatctgcctccaggctgttcgctgccactgcatccatgacgtttcctttggttcccgtgcttccatcttctgtagcaatataaagtgttccattttcttccagttcttttgtcagaaatgtctcactgcgatatcccatcaccagctgacactcggtctgatatcctgcttttaactgctttgccaactccagcatcggcggcacaccgattccccctccaaacagcatggctttcttttctcttcctgtctccaggtcaaatccgtttccaagcggtcccataacatccagagtatctccctctttcatcaaagagaactgctcggtcccggtctgttttccggtcacgcgatacaccactcgcagcgcgcccttctcctgatcgatctcacacagactgatgggtcttggaaggagcttacctccgtcattcgtatacatggagataaactgtcccgggactgcctctgctgcgatcggctctgctttcagccacatactgtaaatatcttctgcgatcttctcctgagagagaaccactgctgtcattttctgtttcttagacatgaatcttcctccccgatatttatcttgcttctaatgcgccctgaatatctgcaaccatagcttccactgctgctctggaggcatctccgaaattctctgctccgaattttgcgtatgcttcctgtttataggctgcgataattcctcgggaggagttcacaatagcgcccagtccatcttcattgaagaagtgtaccagatccttgccctgtccgccctgcgcaccgtatcccggcaccaagatataagatttcggcatcactttacgaagcacttttcccatctccggatatgtggctcctacaacagctccgatatagctgtactcgtcacccatacagtcagcgccccactgtgccactttttctccaaccagctcgtacagtggttttccgtcgatcagctgatcctgaaattctccgctggacggattggatgtcttcacaagaataaaaagaccttttttgtgttctttgcagacatcgatgaacggattcaccccgtcagaaccaaggtatgggttcactgttgcaaagtcctcatcaaatggaacgtactctttgcttcccactttaacgcttcccagatgtcccactgcatatgctgcggatgtagaaccgatatctccacgcttgatatctccgatcaccaccaggtctttggacttacaataatccactgtctttttgaacgcctcgatccccggcactccaaactgctcatacatggcgatctgcggctttactgccgggatcagatcatacgtcttgtccacgatttctttattgaactgccagattgcttctgctgctccttccagagtctccccgaattcagcaaatgcttttttctgtacgtgctccggaatgtagtttaacatcgggtccagtcccaccacgatcggcgcctttgtttctttgatttttgctaccagtttgttgatcattttttcttcctccctgttctctaaaaagggacagaacatgctgtctgtctccttatttttcgtatacgatctttccgtctgctaatgtacagcagacttctcccttaactttccatccgtcaaacggtgtatttttccctttggatgcaaacgtatccacatcaatctgatattctcttctcggatcaaatactacaatatctgcttttttaccggctgaaacacttcctctgtctttcagtcccaggatctttgccggattgtagctcatcttttctgccatctgcatcactgtgagcactcctttttccaccagctctgtataagtcaggcatgcactggtctccagacccacgattccaaatgctgcttgttccattggcttatccttctcagacatcatatgtggtgcatgatctgtggagatcacatccatcactccgtcttttagcccctgtctgagcgcttccacatctgctttggaacgcagcggcgggttcatcttccagattccattgttctttggaatatcctcatctgtcagaataaaatgatgcggacacacttctcctgtcaccttcagccctgcttctttcgcgtctttgatcatccgaacgctgtctgctgtcgagcaatggcacagatgcaatgtggcatccagctcttttgcgatcaggatatctcgtgccacgatcacatcctccaccgaattcgtgatcccttttacacccagttcctctgcacgctttccggcattcatcacgccgccttctaccatggaaatatcttcgcagtgtgaaaagatcagcagatcattctcttttgcttttcgcatggcttttcggaacaaagaggcattcatgacagattttccatcttcgctgagtgcataacagcctgcctgtgccatcccttcaatgtccgcgagctcttttccgccctctccgacagtcattgaccccaactggattacatgcaccggagattcttcttttgcacgcctgtgaacttcttctactttttcttttgtatcagtcaccgggctcgtgttcggcattgcacataccgtcgtcacaccgcctctggctgctgccattcctccggtcgaaagtgtttccttctgagtcagtcccggatctctcaagtgcacatgcagatcgataaatcccggcattacataacagcctgacgcatcgatcactctgtcagcttcagcctgcagatttttttctactttttcgatatcagtatcacgcacaagcacatcacatacttcatccacacctgtcagcggatccacaacatgtccattctgaattaaaatcttcatacagtactttcctttctttgttgattctaaagagcgaatttcccttcactgaaaaaatcacatatgtatatttataataacataaaacaggggaactgcacaacaaaaagaaaaagcgtgttgtaaaatacatactttttcccgatccggaacatactatttcgcgaaacacaaatctaaatttatgcaaaggagacattaccatgacagaaatttcaatcttagatctgcagaatctccgtcatctgatcggaggatactctacgactcactgtaaaatgacagattacgccgcacaggcaacagacccgcaggtaaagcagttatttcaggaagctgccgattccgcactcaaaaacaaacaggatctgatgaaatttttataagggggatttgaaaatggacgaaaagacaatggtatccgacgccttggtcggagtaaacggagaattgaaaatgttcggagatatgataccgcagacagaaaacaaagaactgaaacagtgcctcaaacagattcgaaaccagtgtgaaatgtcacaggaaaaactgtatcaggtagcacgggaaaaaagctattacgtgcctgctgcaaaagcaacccagcaggaagttgatcatgtaaaatccattttgacacagcctaaaatgggactgtagaagaaaaaagtacagtggccgcagatttttgcagccactgtactttttcttctacagttcctccccgtttgtctcaatcacgcgacgaaaccatgcaaaagattttttcttataacgttttccgcttccagttccatcatcatttttatcaacatagataaatccataacgttttctcaattcccctgttgtaaaagataccagatcaatgcatccccaaggcgtataccccatcaagtctactccatccagttctactgcttttttcatctcctttatatgtgccctcagatattcgatccggtaatcatcatcacaggttttatcttcttttagaacatcgatcgccccaaatccattttccacaataaacaatggtttttcatagcgctcatacagggaagccagtgcataccgaagtcccaccggatcgatctgccatccccagtcacttgcttttacatacggattgggaacagaatttgcagagcttccatccagtgattccgtcgtgtctttctgtacgtctgctttgactgcattggtcatataatagctgaatcccagataatcacaaacaccttccgcaagaatctgttcatctcccggttccatcaccggtgctgtattttcccgctcccattctttctttgcaaacgcaggataatgccctctcatctgcacatccgcaaaataatatctttcatgcatacattctgctgctgtcataatatcatcgggattgcaggaatatggataaaacgggacaaacgaacacatgcatccaatctgaaaatcaggattgatctgatgtcccttttttacaaccatagcacctgccaccatttcatgatgtgctgcctgatacatagctttcttcttgtttttgtactgtgaaaagagaaccccggaatctgtccatccgaaaatgtccgcagacgtattggtctgattattaatctcattaaatgtcatccaatatttaactttctctttgtagcgttccataaccgtaactgcataacgcacgaaacagtcaatcacttttcgattcacccagcctccgtattcttttgccaagtaatatggcatttcaaaatggctcagtgtaatgaccggttctatgccatactttaaaagttcatcaaacagatcgtcataaaatttcagaccttcctcattcgggatcaattcatcaccatttggaaaaatacgtgtccaagctatactggtacggaaacacttaaatcccatttccgccatcagagcaatatcacctttatattcatgataaaaatcaatcgcttcgtgatttggataatactcgccttcaacaactccatctgtgattctgcgcatcatttgattgctgcccccagtcatcacatccatcacactaatcccttttccaccttcattccatccgccttccagttgatttgccgcaactgcaccgccccataaaaacgtatttgctaatgccatcttatatctcctcctgttttctttctatattctatgtactttcaacaatgcattctgattttctacctgcttcaaggccactgtctcaatctctgagaattcgtcactgttcgtaacgattacgggggttgtcacttcataaccggctttttcaatctcttctttttcaaattccagaagaagctgccccttcttcacctgttctccgtcctgcacatatgctgtaaatcctcttccctgaagtttaacggtatccatccccacatgaatcagaatctcaattcctgacgtactctcgattcctactgcatgacgactctccaacagtccgacaatttttccgtcaaacggtgcatatacttttccttcttccggaacgatggcacagccttttcccatcatctctccggaaaaaacttcatcatgtacttcacacaatggaattatcttgcctctcattgggctgtccacaatttcttctccacaactttcctcatttgtgctgcctttttctgtatcaggctcctctttttctttcgggtctgcaaatcctacaacctgaatcaatacgattgtcagaacaattgccacagcacatccaactgcttctcccacaaacgacatcggtgcatccttactgatggaatttaccactgtcaaaaggcttgggagtcctgcatatgcataatacgcagaatggaaaaagctcatcacaactgctccggctgctcctccgatacatccacagataaatggttttttcagtcgcagtgtcaccccatagattgttggctctgtaattccgaaaatacctgtgattcctgctgataacgaaacacttttgatttctctgtttttagatctgatgaatactccaaaggctgctgcaacctgagcaacgactgcaattgtctgaaatgcctgaaatgtatcaaatccctgcatatcaaaattagcaagaacaaccggtgtaatgccccaatgtacgccaaaaatcactaccacttcccacaaacctccgatgatggctcctgccagagccggcgcggtgtttgcgagaaaattatatccatttgcaattccatttgctataatggaagatgcaggaccaatcacaagaatggttgccggaaccataatcaaaaagcagatcaacggtgtcagcaatgcttttgctgcttctggcagtttcttttctaaaaaccgttccagataggacaatacccagaccagaaacaatggaggcaatactgttgaagtgtaggttgtctcagacagtttgattcccagaaaacggagtacttctccatctgcaatccgggccgccatacccgcccagtccggattaaccaatgcacaacaacataaaacagcgataaacgtattgcatttaaagtgtttggatgcagtaattgcaataaaaatcggaagaaatgtaaatggtgtccatgacataaaactcaataccgcatatgtcccagtccctgcaaaagatggcactgccatattgatcaggatcaacgccccctgcagaagacccgctgcagccaaaatatatacaaacggtgcaaacacagctgacattgttgcaatcactttattcatcacactctgttccggctgctttgcctgaagattctctatatccagatgcagttcttctgtcaccgcatcatatacctctcccacatgggttccgattacaacctggaactgcccactgttttctacaactgtaattactcccgccattgccgcgactttctcttttgcctgttccggctcttcctttaataccagtctcaatctcgttgcacatcttgtagcattgacaatattttcttttccgcccacttcacagataatgtcatgggccagttttcgataatctctgatctgtgccatctcattctcctccttgttgtgcagagtcttttgcgcgcatccactctcttcttttgatgaaattactatataaaattctcgtttttctttcaatatttttgcagattttgttttttcgtttcactttttctgaaacaaataacaattccaatgcaacaatgtttcatatataaaaaagtacattctttttttgtgcaaaatcaacaattcccttttagctattttgtataactaaaagggaattgtaaattctgcgtttaagattcttcatttaagccccaaagactcatctctcccgctttttcatatttttgattcaagaccagattatcctgatattttctgctaaattccaatccatataaaatatccaacaagtatttaccagaggcaaaaaacatagacatccagaactcttctactttttccgaaccagccgctaccagtacttcatccgcatatctggcaatgatactatcacgatcggacactactgcgaccacccttgttccattccttctcaacagcttttcaatctccgccagccgttcattccgtcctgtgtgactcaaaataattgccacatgaccatctgacggcatgtttgcatgtaatccctgaatattcgttgcagaataaacagcagctctttttcccgcatgaaaaagcagagaacatccatattgcgcaagatttacattcatatcataagcatagaaatccacagaccgcgcctctgcgatcagttttccaacgcgcataagctgactataagaaacttccttttgcgtctccattaccgcctgtttctgaatttctgtgattttccgaaccatagtcacaacattttcccgctcggacatcataattttctcctgtttttcgtccagatagccatccctcagttcactgacaaacttaatcttaaattccggaaaccctttcacgcccagcttctgacaaaaccgtgtcacagaagccgcactggtaaaggtctgatgccccagttctctggatgacatattttcaatggtctccggatgttccagaacaaatcgtgcaatatccttctcccgtcctgtaaaatcctgcgcctgctttaactgctggatcaatgacattttctttcctcccgttccttaatcttgttcttatcttaacgcaattacaaaaacaccgtcaatctatatacacaaagatttttaataattcatgcacaaaaaaatcagaaaacagtctgtctgacacattttctgatttttctctgttataccgttgtatcttctgaagcattctcttcacaaatcaatttttttgcctgcaggatctgcataaactcttctcctgtgatagtctcattttcatacagatacctggcaagttcatgcagcttcgtctcgttttcttttaaaatctgaagtgcttttgtatgtgcctctcttacgatctctactactttggaatcgatcttcgtctgcgtctccggagaacaggtcagggatgcatcccctcccagatactgattctgaaccgtctccatagccaccatatcaaattcatcactcataccgaactgagtcagcatagctcttgccagcttggtagcctgctcaatatcattggatgcgcctgttgtcacttctttgaaaaccaactcttctgcagctcgcccgccggtaaatgtagtgatcttgttgagcaattccgattttgtcataaggaaatgctcgccctcatctacctgcatggtgtatcccaacgcaccggatgtacgtggaataatggtaattttctgaaccggcgcggaatccgtctgttttgccgcgaccagtgcatgcccgatctcatggtaggcaactgtcagtttttctttcgtagataaaatcctgtttttcttctgatatccggcaatcactgtctctacactttcttccagatcttcctgcatggtcactttacttccacggcgtaccgcccgaagagccgcttcattgacaatattggcaagctccgctccggaagcccctgcagccgttcttgcaactgctgcaaaatccacattatcagaaagccggattttctttccatggactcttaagatttcttcccttccttttaaatccgggagttctaccggaatcctgcggtcaaaccgtcccggacgcagcagcgccggatccagtgaatcaggctggttggtcgccgccaggatcacaacgcctttcgtaccgtcaaatccatccatctctgtcagaagctgattcagtgtctgctctctttcatcatttccgcccatattgccatttcgtttctttccaatggcatcgatctcgtcaataaatacaatacacggcgctttctcattcgcctgctggaataaatcccgcactttcgcagctcccataccaacaaacatctccacaaattccgatccggaaatcgaaaagaacggaacattcgcttctcccgctaccgcttttgcaagcaaagtcttaccggttcccggaggtcccacaagcagagcgccttttggcatagccgctcccatctcccgatatttatccggatcgtgaagataatccacgatctcacttagcagctcttttgcctcatcctctcccgccacatcggaaaacttaatcccgttgctggatttgacgtaaatttttgcgttgctctttccgcctccgaacatcatagaattcatcggatttgctccgccgttcatcttcgacatcatcttcttggataaccatctgccaagcatgataaaaatcgcgatcggcagaatgtaactcagtaaaaagtacagaatcggagacatctcttctgtaatcttagaagaaaagtctgccccggaatcatatagtctgtctaccagacccggatcatccataacaccggtcttatacatcttctcttcactcttgtccgtaaaaataatctccccgctgtcaatgttgacctttccaatttccttgttctctgtcattttcatgaatgtattatagtccacttcttttacagagtgctccagtacattcgggaataccagactgttcagcaaaaccatgattgttgctacgatcagacagtaatataaaaatggcttctttggtgattttacttcctgcatatcattctccttccccgccacatatgtaacttaagttagaatgtagtatagtcgagctgttttcagaagtcaagctagaaccccgtacctttctgaaatttcatttttattttatgtttcttttatttttacgtagtattctctctcttaacgcgcgtttttccttattttatccacatataaaacaatcagctgcatcacgcttctgatgcagctgattgttcgattatttccagcagtctgtatttttaattcctacattctctgctttaaatactggattttttccggcctttttctgtgtttcgtaatctttcaatactttcagagcaatgttgcccaaaagcagaattgcgataatgttgacgattgccatacatcccatcgtaatatctgccagattccataccagtgagaaatctgcctgtgcgcctaagaatactgccaaaaggcatgtacagcggaacacgaacagtaaaaccttattattcttgataaacaaaatattggattctgcataataatagttaccgatcagactgctgaatgcaaacgcaaaaatggatgccgtgataaagtggattccccatgttcccacattcgcagaaatcgctttctgcacaaacggaattccatccagaacgctcgcctctccctgaacaccggaaagaagcagcatcattgcagttgccgagcagattaaaagcgtatcgataaatacagaaattacctgtaccatcccctgttttgccggatggcttacagatgcacttgctgccgcattcggcgcgcttcccatacctgcctcgttggagaacagacctcttttgataccgatcactacagcgcttcccgccataccgccgaaaatcgcctgaaaatcaaatgcctctgacaggatcatcgcaaatatacccggaagctgcggcagatgtgtcacgatcgtaaacagtcccatcaaaagataagcacctgccataatcggtaccatcaccgacgtaataaatccgattcgatgtactcctccgaaaatgatcagaccggttccgactgccagaatcaaacctacaatcatcggataactgctctcactgtatcccggaatataatattccagagcagaagacatattataagactgcagaccattgaatccataagcaaaacaaatgatcagaagcaccgaaaaaagcactcccatccaacgttttccaagcgccttctccatatagtaggaaggaccgccgcggaagtcttttccatcctttgtcttatatacctgtgccagtgtactttcgataaatgcagaagcacttccgatcacagccatcacccacatccagaataccgctcccggtccgcctgccgcgatagcagtcgcgattcctgcgatatttcctgttccgacacgggatgctgtggaaatcataagcgcctgaaaagatgagacctgtctcttcccatctcccacctccgctttttccgtaagaatccgaaatccttctttcatcagacgcacctgcgcaaaccgtgaacggattgaaaagtaaagtccggttcccaacaacagaaacaacagcaggtacgtatacatcagatcattgatctgccctaagatgtcatttaacatatatttcctccttttcttctatttcgctgtcacatttgaacatgcgtaatgtcgatagtataccagaaaatccacacctgggcaatatcctatcgaataactacactaattcaacagctttccccggaacttattccatatatgaacttgaacatattcataagccctatcataaatccagactcccacctgtcctgctgccagaacagccagaagcagtccaccggagagttctttcatgaaaagaagttcctgaaatatcagaaccattggaatatacatcaaattaaacaccatatatttcatcacccagaaaatccaggatttctgcatcttttcaccactcttacccaaaaatcgccagccgccttccgttgccaggatgtaaaatcccatggcggcaaatgaaattacataaaacttgttcggtgtgaccaaaaatccgagcaggatatctgccagataaaaagccactcccgctttcatcccgaattcacggatgataatccctacaaaataggaagctgccgccagtaaaaacagcgtattggtctcgatcacacttcccagtgccatacagacaacagaaagtgccagaagcagtccgctaaatgcagtcattctcgcttttacatgcatgaacaaagatcgcctcccatacattcacacagcgtatctgcacaccagaggtcgcagcacatattcccggttccgcagctctgtccgccggctccatatccacctccatatggattgctctgatatcttctgctgttccagtccagctgattcaacaactggcgatactgtacattattcggttccatattgactgcctgtgccgcatgctctcttgcaagtacgttatttccgattcctgcattggcaaacccgctggcataataccacatcgcattgcggttcggcatccggtcaagaagattcagagcctccctgtagtttctgctgttgatataattgaacactgcctgcatctcggcgtcctgcggtccgttgtatgtgttattgtaagaattcccgccataggaagaatttccgtaggaatatccgcctccctgctctctctgacgcatgatctcatcatatgcttcctgcacttctttgaatttttcttccgccagatctgcaagcggattgttcacatttgcatccggatgatactttcttgtcagctcccggtatgctttttttatctcatcatctgatgcattctgaggcactcccagcacatcataaggattcttgctcattctttttatttccttcctctaactttttcttctgaattttgttataacgattccagactccatcatacaggatatttcttaaaatgtccacatccaaaaggcatggcagcttctcaaactcagcgctgcactctgcgatcatcatacagaggatctgccggatctgttcttcataatctgctctttcatgcagacgtttcagtggattgtaacactgcttacgaagatcctcttccagatcttcataagcatccataatgtaaatatattttcccaggaaaaatcccatgcgccgcagtgtctgttcccacatatcttccttatatacaaacagatctgccatcagtcttccaaagcagcctgctgatcggtcgatctcctgactgttctctttttcacagtctgagagttcctgcaaagactccttgattgctttactctgccttggatattgctccgcaatcttttctgcctttttcttgagcagtccgccccctaacagaccgcttactttcttctcatctgcccagtcatctttcatatggtaatatgcaagcagaacgttcatatctgctgcatactgtgtaatctcattctcgatcatcgcctgcttcttcacaggatgcactttacatctgtgctgattcatccggttttttgcctcatacaaggacgacagcagaataatcgcaaatgtcatatcataagtcagcgtcatctgtcccatcgtcccgtaatcctcttttaatttccggcagagtccgcaataatatgccttatattttcgcaaatctttcatcttcagctccggttcgcagatcgtcacataaccaaacatgattcacctcttctttcgtaacatttccaaatacatgatgctatctattatactcatttcctgcaaaaatgtacagaaaaacaggcagacacttcaaaaaagcatctgcctgtccttcttacagtcgttttataacatttctgcacgcagttcttctgcactcttcgggcttaaatatgccggagcaatatcaaatactgtcttgcatcctgtctgtccttctttatggaggcgatatgctgctcttgcatatgccagaatcacagaagaagtaaattccggattggaatccagtttcagactgtattcgatcagatgtttgttttctttttcccagcctgtcacaccacttctgagtacaaatcctccgtgcggaattccactgtgatttgcttttaattcttcctcgctgataaaatgtaccgttgtgtcataatctgcaaagtagttcggcattgtcttgatctcctcttccactcttgcagcatctgcgccttcctccagcacaacaaagcactcccttgtatgtttctggcgtgtagtcagttccggattttcaccgcttcttactgcttccagtgcagactctaccggaattgtatactgttttgcgtcttttacacctgcaatccggcgcactgcgtcagaatgtccctggctgacaccttttccccagaacgtatagtcttttccttccggaagtactacatttgcatacagtctgttcaatgagaacattcccggatcccagcccacagagataattccgatgtgtccgccttcttttgcagctgcgtctacatttgcaaagtgctccggaatctttgcatgagtatcaaaactgtctactacattgaacatcttcgcatattccggtgtctgtacaggaagatctgtcgcacttcctccacacaggatcattacatcgatcttatctttccagtcagcagcatctgcaatgctgcacactgctgctgtctctgtcaatattgtcacgtcttccggatttctgcgggtaaatacagccaccagttccatatccggattctgtctgatcgcgcattccactccgcgtcccagatttccatatcctaaaataccaattctaatactcatctttttttctcctttgcactttgtattttgttacttattataatctccatgctctatttttcaagtttttatttttgattttttgtattttttcaaatcccatttttatgcctgctcatcataggattccagaaaatgatgtttgactccgttttccttgtatgcaatcaccgtactcaaattgacattttccacactcttaaagatattcccctctacatacgggttcgtttctttcagttttgcgatcaggtgcttgatctccatccgtttggatgcactgcttccatccgcactgcaggtactgcatgtctcggtaaaccggcaggcgcactgcagaaaatgcagatgattgtaatctctccaatgcttgatatcatcttcccttaccagatacagcggacgaatcagctccatcccctcaaaattcgtgctgtgcagcttcggcatcatggtctgtacctgcgcgccatacaacattcccatcaggatcgtctcaatcacatcatcatagtggtgtccaagtgcaatcttgttgcatccaagttcttttgccttgctgtaaagatgtcctcttcgcattctggcacataaataacacggagatttttccacatcaaacaccgcatcaaaaatatcagactcaaaaattttgattggaatccccatcatttttgcattctgttcaatcagtttccggttcagttcactgtatcccggatccatcaccagatattccacctcaaacggaaacttgttgtgcttttttaattcctgaaacagctttgccatcagcatcgaatcttttccaccggaaatacagactgcaatcctgtccccctcctgcaccagctcatattctcgaactgccttggcaaatcgcgagaacagtcttttgtgaaattttttgcggatacttttctcaatctcttctgcccgcaaaagttcttcacctggttcttcctcttccttcttctgctcagcttccatccgctctaacagccacctcgtatatccgccttccagactgactgcatcatagcctttctcccggagcacttctgcacattcttcacttaatgcccctcgcgtacagtaaagcaccagcttcttttccttatccgccgcatccagattctgctcgattgtttctgtcggaagccactctgcccccggaatcattccgtatgacatggaagcttcatcccgaatatcgatcaggcgataagactgctccggcatggataagagctctttatattgtatattccactcttccatctttttcaaatgtatcctttctatattcctaccatagaaataagtttaataacctttttcattatacgggtattcagaagaattgacaagtagcagttttgtataatccttttctgtattagcacatttaaaacatcatatgtgagaggagaatcaaaatgacattgagagaaaaatttaagtaattaaatctgatttgcaacgagctcttttaagcgtgaaagctttactctttcgttttatttttcaattgaataattgcatcacgtacagccggaactacccgtttatcaaacgcattcgggataatataatcatcccttaattcttcttttggaataatcgatgcaattgctttagcagcagctaccttcatttcttccgtaatatcatccattcttccatcaagtgcacctctgaatatccccggaaatactaacacattattaatttgatttgggtagtcacttcgaccggttgcaacaattcgtgcacctgccacttttgcaagatttggctcaatctccggttgcggattggccattgcaaaaataatagaatcctttgccattgtttgcaccatatctgttgtcagtacatttggtgccgatactccaacaaaaacatcagccccacgaactgccaattcaagtgttccacgaattccttcaaaatttgtcacctcggcaaactctttttgatcatcattcatccacgtttcacctttacataatacgccatttttatccacaagcacaatgttatttgctccaagagctttaagaagcctgcaaatactaagtcctgcacttcctgccccattaataacaatctttacagcattcaatttttttcttaccaaaaatagtgcatttatgagccctgcacaaactgctattgctgtaccatgctgatcatcatgaaaaacaggaatatccaattcctctctaagtctgcgttctatctcaaaacatcttggggcactaatatcctccaagttaatgccgccaaatccaggcgaaacagccttgacactcgtaataatttcttccacatcctgagtagctaaacaaattggatatgcatcaatatttgcaaaagttttaaacaacactgcttttccttccataactggaagagccgcttctggtccaatatttcccaaaccaagcacagcacttccgtctgtcacaaccgctatactgtttccctttcccgtcatctcgtaaacctgatttgcatcctcgtgtatcatcatgcacggtcttgcaactcctggtgtatatgcataactcatatccgccatattttctaatttcaccttactaataacttctaattttccttttatatttttgtgcaattgcactgctgtttcatatacatccatcttcctacctcagaaatcctcttcttcctcattttcattttcaaaatcatgattaatataatcataaatatatgcaatttcgctcatcacaagttctatgttatactgctttgctatattggcaaagcttctcctcaccttctctataaaatccgaattattctccacaaattcggtaagatttaggtgagtacctatttcttcttttttgaccatacgctcaatcaaacatgaaatatgcacattcagtcccataatagttttgggcaaaaaacgttgttgcatttgaagctgcagctcctctaacatctcatctaccagcgtaagaacctttgtcgcattcaatattgtcagcgattccactacattttgcaaagaaaaagcatttagcatattcttcttaaaggtttcaaattcaaaggcagacaagtaaccattaaagcatattttcaattgttcaaagttgcgaaatgtcatgatatcttctattgatacaatcggaaacttatgttttcctaacggtatcgtagtagctgcgaatataacatgatatttctccaattcatccgcttgatttaatgctataaacgtttcatagtcataacatttaatcgttacatgcaaatttttcggaagactgtttaaaaaaagttcactaactctggccgcaacattacttccactctcactgacaaagatcaaagcatcctcgctattctttttcggaaaataattatagctcgttgtaattgtccccttggtatttgctataatctgctccacattctcgccattcatgattgcagttcctactctaattgccagatttgtcgatacattgttaatgattccaacattcacatttgacgtatcaccaatcatatcaactatatgctccagggaaccaatatccacaaggaacagtacttctctcttctcactgtaataaagcatttttcgaagctccatgcagatatcattaattgttttatccaatggcatatcaattgcactaaaaatatgtcgacaaagtaccttgttgcacacatcagcaatactacttgctgttgcatatccatggcagataatgtaagcctgaacaggaagcacttttttagcccccttcacattataaagcataatcgtcaacataatttcttcaatgtttgaaagctctatttccaaattttgttccacaagaccaacgatttctttcgcaagtaccatttcacctgttgattgtctttccataattctattcagagtctcaacatcctgttcattttccgatttccattttataagtatttcatgaaacattccactgtcataaatccagcgggcaaatacgataataaaggtattaggcatatttattccatagttatcctgtatatacgcaaaaatctttaaaagtgtctgctctatgaaacgaattctttcatcttccattgtacgattatataaaatatagtcattatactcatctaaaatctgatagctctcccttagaaactgtgtgtattcaatcttttcacttatgtacaatttcaacttttcaataatctgatcacataatagtttttcccgaaagaaatttgtgtgctcataaatctggttcaatgtgagaaatttctctttcattcccattggagtaatttcaacatgcatttcctgcacaatttctttgggcagatccatataggatattacaatattttctctttctttttgagtagaaaacgctctcgcacagatggactttatcactttttccaattgacgaatattgtctttataatgatattttgtcaatacctgataactctgctcgcttatctgaattgattttctaaacactttttcctcgttcctcaaaaaagtacagactaacagttccttctccaccagtgttcgattactgagtgtaggcagttcaatctgaattggaataagctgctgtatataactgtgtagagttcctacccgctccgaggatgaaataataagacggctacgtccatatatactgtcattatgttctggattccaaaattctaccagtgcaaatttagcctcatctgaaagcatctcaaaatgtttaacataaacaaaatcattttctgttatggttttcaatttttgttctacatttatttttatacattctgcatcccaatccttcaagtcatatattgcacaattgatcaatacaaatctactctctttactaaccaccctatgttcgattgcatattcataggctaaacgagccaaatactcttttccagttccacgttctcccaccaaataaaatggcaaaccatttttcggataatccaccgcaaccttacacttatcaattgcctgtttcaaagaaagattatagcctattcccttttcaaaatttagtttttcgtttgacttttttctaatacacgatataaattcctcaagatcatagaattccgaatcaatctgctctaattcatactttgccattactgtttttcgttcaaaatagtaaaccggtctagtattgattttgattaaatacccctctttaaaaccctcattcaaatattgactggtcagatttctactgatattaagcttattacaaatagtagatgtcatgaaattatcaaaatgaatcaaatccaaatttgcagtttctttcttcatatattcataaatttcctgtctcgtactattaaatactgaccctgtcatccttcttcttcctttcctactgcgttctctttatttattgtactacaatagtagcattatcccaaaaccattttaccgattctgggataatacaaataatatcatattctagtaagacgcttgattattcatatatggaactatcaattctgaccacacatcgttaaatatctttctaccttccaatgcctgcattgttatcactgattgttgttctggcaaaacaacaatgtattgtccatactttccatctgcgcgataggatttcttatccggatttatccaaaattgatatccatatcccgcctttggcatatttgttgtaatatgattatgcgttgcatcctcaataaagctttcagataaaatctgttctccattccattttcctttttttagaagaaatcttcctattcttgacatctcatcaatcgtcaaaagcaatccatttgccgcagtgttatgcccctttggacaaactagccaatcaggatttcctattccaattttgttaaaaaatcgtgatgtcatataggacaacaaagtttctgatgatactttttcaataatgcatgctaatatataggtattgaaattacaatattcaaaatgctcacctggctcgtatgcaaattcacttttcataaaataatccacccaatccttaactatatatctttctggatcatccgaaaagaaaagctgttcctttagaccacaggtcattgttaacaaatcccggattgtgattttagttatttgagggcatataccaagatattccggataaaaatctgacactttctgctcgagcctcaacaaaccttcatcaatggcaattccaatacctattgcagtaacacttttgctgacagaataaacatttaaacgtgtttttgttcctatacgattatattcctgtatcagtttatcatttttatatatttgtgcataatgaattactacattcttttcattcattttttcaataaagctttccagttctgtcatcttcgtgcctccacaaccctaaatcatcctatttttttctagaaaataccaataaacgtgccgagaatgcttaaaataataattccaagtaaaatccaatttacctttacacctttctttataagcttataaattcccaatgttgtaagcaatggaagcatctttggcatgattccatccaatacatcattaattgcaatagcggaatcaccgctgcctattgttagtccaagatttaccgacaccatagatgcaatcataccgccaataaccagtaaacctatgatagaagctccttgaaacaccttctccgttattcccatcttttcaaatttggtcaatgcttttaaccctgaattatatccaatatgtacaccaaaataacgaaccagaatattgggaatattaaacagcagtaagaataagattggtgcaaaaaaattacctgccaatgctagcgaacacgcaatccctcctgccagtggtcttaatgtaccccaaaataaagaatcaccaataccagctaatggtcccattaaactcgcttttactgcattaatagagcttatatcgaactcttcgttatttgcattttcttcctccatagctgctactacaccaaaaataaacggatccaccataggcgttgaattaaaaaattcagaatgtctcttcaatgcatctgccaacttctccttttcaggataaagttttctaagtactggtgaaagtgaatactgacatccctggctcatttgtctttcataattgaatgaagcattgacagaaaaagaacgccagaatattttattaatatctttttttgttaatttattattagaagtcgtcgtcatcgtcattacctccctctaccactgccgtctttggctttgcatttgtactatttatcataagcgcaacaataattactcctagcatagcaattcccaatactggaatgttcaaatatgccgataagataaatcccaacataaaaaatggcgcaacccttttattaattaacatacttgccaataatgcaaaacctaaagctggaagaatacccgctgcaacagaaattccatctttaacaaattgtggtatcactgccagaaatgcctctaccgctggcgctccaaatccgtaacatacggccatgatcaccgccataaccactgcgtaggacaaaaaactaataaggtgcattctgtcaactccctctgcatcacctttcattgcatactcatccgatttatgcaggaaatatacacgaactatcagataatatgcattcttaataagaagtgctactgttgcaattggaatcgcaagtgctaatgctgcttccgtacctccgcctacactaattgccaatgctgttcctaaaataccacctgcggtaatttctggcggcaaagctgctccaattgttacatttcccataaatgcaagctctaaagttgcgccaacaactaaacctgtttgaaaatctcccaataccaatccaactaatggtcccattacaataggtctttgaatcatggagttacctaaaccacattccaagaatccaataaatgctacaattccaattaaaattgtctgaatcatatctttacctctctaatattttaatatttttttcggatcactaggtacagcctgaatgaatatctcttttccgattttatgaacatcttccaacgccttttcttcttcatctgttacattcaccatcttagacaatgcgtgtgtttctgatgtagccttcgttccaccgagatttatgctggtaatctgaccacagtcctgtaccaaacgaattgcatccataacgttgctgacgactatcagcaaattatatttatctgttttgccttcattaattgcaacgatggaatcctccacacttttgattactaatttcaccccacttggtttccccaatttaagagttgcctttcgaatctcatcattcaccacatcatcatttgcaatcaaaatacaatttgggtttaaatacgagcaccacgaaaatacaacctgtccatgtaacagtctatggtctactctaagtaactgaatcattatcatcttctccttccataattaaaaatcttcttctccgtttgcttccactttttgcaaaaactgaatcatatctttgctctcaaaaatactccgttggattaattctctcgtatcaacttcatcactaattattaaattaattaccaatggagcattcataccagagattacatatacatttgaatatgaattaaacataagcgcctcattatttacacttcctcctaatacatcagttacaagtataatttcatcttttacatgcttttccaacaaatcggatataaacttttttacatcattatgtccatcaacataagcatcataggatataagattttcatgagtacctgtaattagctccactgtgttcttaatcccggatgccattgttccatgtgacatcaatacaatatatctcatttttctcgcacctcctgattatcagtatatatcatttctttatttttgtttataatgtcgattttttcatcatatttccatgaatttttgacactaatttcaatttattaacaccttttacactttctttcatactttcgacacttttggctatcatttaacgttaaattttcacaaaattcccctaacatttttccattctactgctataaggataaatcacagatcattggtgccgtcaataaaaccaagctgtctggctatagagaccattcttcggaaaattctctctaaaatgtcggattcattcagggtcttaataaaacggttagtgtaacttcactcggtgtagttccaaagtaatcatattcgagactacgccaaaaaaacgaatcagaaatctttataataaaaaaaccgtaaagctacatttcatgtaactttacggtttttttctaaaaatcggagtgacgtgattcgaacacgcgacctctacgtcccgaacgtagcgctctaccaagctgagccacactccgaaataagataagaaaccttatcttattcaactacggatagaggactcgaacctctactaacagagtcagagtctgctgtgctgccattacaccaatccgcatcaactcatgttgtgtctctgtcagacgcaacatggttattatatccatatgtgtaaaaaaagtcaatactttttttcattttttataaaaaatattgcttaaattcatatatttcttctccatctgtctcaagaatcatataactcccccttctgccttcctgcctcggaaaagacagacttcccggatttaacacagtaatcccgtctctttcttcaaaatacggacgatgggtgtgaccgaacataataatgtccgcatttcttgcagccccttccacccgaatctgctctgtctccattgaaacataataactgtgtccatgagtaataaacacttttttctttccgatccagaactcttcttccgccggaagataagagaaaaagtcattatttcctcttatcatatgtttttcacattctacaacagcctcaatataatcttctccgccttctacatctcccaggtggataaacatgtcgatgtctccggcctctttcagcgccctgtcaagacttgtatgtcttccatgagtatcactgacgatcaatactctcataaaatacgccctctattcttctctctcttttacttccataatcgcacgcatggcacgaagtgcacgtcccctgtgactgagttcatttttctgtaccggatccatctctgctgttgtgcatccatattccggaacatagaaaatcggatcgtatccgaatccatgttctcctgcaatctcatatccgatcattccttcgatcgtaccacgaacagtttctaccgtaccatccggaaatgccgccgcaatggcacagacaaaccttgcggtacgcttttcatccggcaccccttcaagcctgtccagaagcatctgattcttgatatcataggaagtatcaactcccgcatacctggccgaataaattcccggctccttattcagataatcaatctcaagcccggaatcatctgccagaataatatcatccggcaagtactttgcgattgcctttgccttaatctgtgcgttttcctcaaatgtggttccatcctctacgatatcaatatcaattccagcttctttcatagaatagatcggcattcccagatcagccaggatcatatggatctcttccatcttattctgatttccagttgcaaaaataattctcttttccatctgttattcctctatttctttgcttttggcggtctcggtcccataaactggtaaaaatatgtcttcagcattccattgtagatttttctgtttttgtctgcttttcttccaaaatagcgctctgcatcttcatagcttgtgatcatatacgctgaccatgaatccagagtacggaaactttctccaaaatcagaatataacttcggaagttcctttttctcctcaagacgctctccatacggcggatttgtgatgataaacccgtatttcttcggatggcgcagatcctgcacggctctctgttgaaaatgaatcatatgatccacgcctgcatcttctgcattctttctcgcagctcttaccacgtccggatcaatatcatatccctggatgtctacttccacgtcgtcctgtatcaggtcattcgcctcattgacagcgtcataccattctttctttggaatcagattggtccattcctccgcagtaaaagaacgattcatacccggcgcaatgtttgctgccatcatcgccgcttcaatcggaaatgttccgcttccacagaacggatccaccagaatacgatctttcttccatggtgtcagcatgatcagtgccgctgccagtgtctctgtgatcggcgctttgcttgacagctgccggtatcctctcttatgaagtgaaaccccggatgtatcgatccctaccgtgacaatatctttcataagaaacactctcaccgggtaggatgctccactttcctcaaaccaggaaatatggtagcagctcttcaaccgctccaccatcgccttcttcatgattgactgaatatccgatggactgaacagcttgctttttaccgatgcagccttcgtcacccagaactttccatcccgtgggatataatgctcccaggggatctgcttggtcttttcaaacaattcgtcaaatgtaactgctttaaatgatcctgccttgatcaggatacgctctgctgtccgcaaaaatacattcgctctgcatacagcttctgcatccccataaaaagtaacacgtccgtcttccacctgggagatttcataccccagatccagaatttctctttttagcaccgcttcgagtccaaaatgacacggtgctatcaattcaaatctttccatatattcctccatatgtatccgaatacacgcattgcgtgtgtcaaatatctctactcatattactataattcacacgtatagtaaagaagaggatacgattctgctgctgtctgcacactaaaatcgtatcctcttttttcacttacatgagtcccgctctgatattatctggcgttgttcatgttttcgctggaattcgtgccgtctctatggcagttttttgatgttgtcttatttgcatttctgctgtttttactgtttctgttctgttcatctgcataggatgaatatccgttttctgatgcattgttgtttgccatgtttctgttgttttctttattgctgtagttcttagccatgagtattcctcctgaaaaatttatttggtacactcatagtatctctgcatctttcaattttattcggaatttttgtatttttgcttgcattttccaatttcttatattatacttgtgcttgtagaaagtagtctttctacaaccccttattaattatttatactcccctcaaaagaccgatggctcccccatcggtcttttactttatctctatcaacgttttcccttgaaaaactgcacgatcagacacacgatcagaattggaacaagaaccgggagcagaagcctgatgagccccgtaatcacagaaataaccagaacaattccaaggatcaccgccagaatgatcagcgcgatcttccaccacggaaatctcaattcctgaaaatgcatgtcctgtctgccgttctcttctccgtaagcaccatagtcgctgccgcccgattcatttacaatcgaatcatccgtaccatcctgcgcatctgagatcgtccttgccagaatccacggatctccgagcatctccaacacctgagcttcggatttgccgcttcgcacttctccttctatatagtgtctgctgagcaaactgaaaacacttgattttactgacttttgccccattttctggtataatgattgcaaggattttgacaaaaacaaatcgtttttcttgcagttttcttacagattttaagtataaaggggctaaaacaatgtacaaaccgatcgacaagttacagcattcattcctcgatttcaaccaacctatgggactccacatgaatccggataaccgctgggtcagactggctgaccgaatcccatgggatgaattcgaagtaaaatatgccaagctgtttccaagtgatacgggtaatgttgccaagcctcttcgcatggcattaggagccctgatcatccagaccaagttccaattttccgaccgtgagcttgtggaacagatcgctgagaatccgtatctgcaatactttatcgggcttcccggttttcgggaagaagctccgtttgatgcaagtacactggttcttttccgtaaacgcatttcagcagatatgctgatggaagtaaatgagtatcttcttgctcacaaggaggatgacaaagatgaccatactcctccatccgtaggaaaatccggtgatgatggtactgcaaaagaagatacaaacaaagggactctgacacttgatgcaacctgcgcacctgcaaacatacgttatccgcaggacatctcgcttttgaacgaagcaagagaaaagctggaaaacatgatttactgtttttgtaaatgttatggtcttaagttgccaagaagataccgcaaacgtgccagaaaagagtatcttgcatttgccaagagcagaaagcacacggcaaagaaaatccgcagcgcactccgcagacagcttggctacgtgaaaagagatcttggctatctggaacagttcatgagtgatggatacgccatgacaggtaaggatatcggcctatatcttaccatcatcaggctgtatgaacagcaacagtatatgtatgataacagaatccattctgtagagcatcgcattgtaagcatttcgcagccatggcttcggccgattgtcagagggaaggtcaaagcacctgttgaatttggtgcaaaatttgatctcagtcttgacagcgaaggttatgggcgcctcgaaaaaatatctttcgaggcatacaacgagagcacctgcctgattgaagcaatagaacgcttcaaagagcgtaccggttattatccagaacgtgtcctggcagatcagatataccggaccagggaaaacaggagttattgcaaagagcatgggatccggttatcaggtccaaagctgggcagaccaagcgccacagcaaaagttgataaaaaacaagagtatcaggataataccgatagaatcgaagtggagcgcaccttcagcctgagcaaacgctgttatggtatgagctgcattaccacaaaactggaagaaacgcagttgacatctatcgcattatctgtattcgtgacgaatctgttcaggattcagaggcgaatactttgtgctcttttgcatctgttccgattctggcatgaccggaacagatgtaagagttggaagttacagatagctgcttaatcagcagacactatataattacgataatactctatattctctaaaacagcctgagcactcagttttccactcaacgctgtgcgcagctcttccagaaattctttctgtgacatctcttatcctccatttcctttcacatctgtcattttgtccattatatcaagttctcttttcccttacaactgcgactttgctgttcataatttgttcatttatcattcaaaattctttcattttattaacattgtttcttcatttctcctgactatactataaatatcaaatgaagataaaacatttgatagcaaaagatgccgcatagtagtgatactattcgaataaactttttcataatactcgccagggaccgtgacaacggtcacctggcatcctccctgttatagggctttttttattttacggaaacaggatttccgcctgtcgcctcttggcagttcccgcaggatctgatcaaattcccggtatgttttctttccattttcccctgtacatttttggatcaccaatgacatcataaactcctccttccaggtaagcggcggagccacactcgtatatgccagcataaactgaaacaatttgccgagaccatacaagtctgttccgactgccatgccgcttcgtttctttcctgctggcatcacgaaatgcgcgcggacagccggtatctgcattttcttcatcacaaatccgttgccgggtacactcagatccagtaaaagcagcttctcctcccgcgttacgatcacactgtacgggctcaaataccggtagcactgcatccctttacttcgatgataacaatccagctgggtacacagcatccgaaaccattgaaataaaagcttttttggtatctttttctccgtctgaagacgtccaattaaagtttgccctctcacatagtccatggcaggcctgcattttcctccatgttcaataaaacgaactacatcatatcctttctcgtctttcactccttctcctctctgcatccttgctctctttttaactactgttctgtgaaaaatagattcgaccgaatctgtatctgatgacagaaaacttcctgccgtcatatgaattaaagaatataaaaagtaattgtatcttactcgatttccataaaaaatgcaagcacttttctgtgcctgcatcatgtgtttctgtctctatttttccagaaacagttttctcgtaataaaattatataccattacaattgctgttgccccgatctttgcgatcatgtagaacattctaaaaatatcgactgcgatccacatcacgagctggttgattcctagtccgatcacactaagtatgatgaaaatgacaaactctgctctcttgcttctgtcctccgccacatcaaatacccagtgtacactcaaaatataattgtaaataaccgaaaccgaaaatgaaattccgctggaaatcagataattgattccgatcagctctgtcagaaagatcatcactccatagtcaatgacgaatgcacttccgcctacaaatgcaaaacgaatgatctgacgcatcagattttttttcttgttttcttccatcttctcacccttttctattccattgtttccagtcgattcagtgctgcttcgatcactttatccatatcgtaatacttataatcgccgagacgacctccaaaaatgacatttccttccgcttttgccagctcctgatatttttcgaacaatctggtattcttttcatcatttaccggataatacggttccatccccactttccactcggaagagtattctctggaaattacggttttctcctgctgtccgaattcaaaatgcttgtgctcgataattcttgtgtacggaacttcccgttctgtataattgaccactgcatttccctgatagttatcacagtctaatacttctgtttcaaatcttaccgaacgatactccagcgctcccagccgatactcaaaatactcgtcgatcattcctgtaaaaataatcttttctgcaacatccgcctgttcttttcggaattcaaagaaatcaacacctgttctgacttccacaccctctaacatcttctcgatgattcgattataaccgccgatcggaattccctgatagcggtcattgaaataattgttgtcataagtaaaacggaacggaagccgtttgataataaatgccgggagttctttgcagtcacgtccccactgcttttctgtataccctttgatcaatttttcataaacatcacgaccgcccagagacaatgcctgttcttccagattctttggctctgtaatctgacattctgccacctgttttgcaatcatttctttcgcttccttaggcgtacggattccccacattttgctgaatgtattcatattaaacgggagattgtataattcatccttgtatacagcaatcggagaattgatatagttgttaaactcggcaaactgattgatatactcccacactttttgattggaagtatggaagatatgggcaccatatttgtgtacatggattccttcgatctcttcacagtaaatatttccagcgatgtggtctcttctgtcgatcacaagacagtgtttcccttttttatgcagctcatgtgccatcactgctccatataatccggctcctacgattaaataatcatactgatacatcttttgtcctccatagtttctgaggcagaattctgcctcatacaatctggattattatagcaccttcttacgtctctgtacatatctcaaattttttaatttttttcaaaaaagttgttgacaaatcgattgcttcaggttatacttaatttcgttgtgaacgacatttgttcttaacgggtgcgattagctcagctggatagagcgtctggctacggaccagaaggtcgggagttcgaatcttctatcgcacgctaacctctgcaggatatctgcagaggtttttttgtgttctcaattatttttctcactgatcacttttttcaaatccggactagaattatccaatatcttgtgttataatttccaaatccactatattttgtatttttacaacttaaaacgaaaaggagacactacatgcaaacgaccgatcctacaggaatttttaatagaaataaactctcagaggagttttcaaacgttcttcctgatgaagcccgtttaaaactggatgcgattttgcttgagatccagactgatttccctgaaatctgctactctttggagtatctgaatacaaaatttcgcagttttctcacaccgcagagtacctgcgggcagaagcttgaaagtctgtttcaggccgcagcagaacttaccaccgcagaagctccgaaatgggagtttattgctgcaagactattatattttcaattcagttttcacttaaaacaggaagaaacacgcagagaactttctgatttttataaaaaactcgtatatctgacccagcagaatctgtacggttcctacattctggagcattactcccgggaagagctgttacttgccgaaacttatttaaaagcggaacgcaacaatttgtttactttttccggactcgatctgctcttgaaacgctacgtcatccgcacacatgaccatattccactggaatctccacaggagatgtttctcggaatcgcactgcatctggccatgaatgaaaaaaacgatcggatgctctgggtaaaaaaattctatgatatgctgagtcgtctggaagtgactatggctacaccgacactttccaatgcacgtaagccatatcatcagctctccagctgctttatcgataccgtaccggacagtctggaggggatttaccgaagtatcgataattttgcccaggtcagcaaattcggcggcggtatgggaatgtatttcggaaaagtacgggcaagcggaagtaatatccgcggattcgaagatgccgcaggcggtgtgatccgctggatccgtctggtcaatgacacggctgttgccgtagaccagctcggtatgcgtcagggtgcggttgccgtctatctggatgtatggcaccgggatctcccggaatttctacagctccgtacgaacaacggagatgaccgcatgaaagcgcatgacgtatttccggcagtctgctatccggatttattctggaaaatggcaaaagaagatatggatcaaaactggtacttaatgtgtccgcatgagatttttcaggcaaagggataccatctggaagactactttggagaagaatgggaacgccgctatctggattgtgtacaggatgcccgtatttccaaacggacagtcacactcaaagatatcatccgcctggttcttcggtctgctgccgaaaccggaactccgtttacatttaacagagatacggtcaaccgcatgaatccgaacggacatgccggaatgatctactgctccaacctctgtaccgagattgcccagaatatgcaggcaattgaagaagtaagcaaagaagtacagaccacagacggagacaccgtcgttgtcactgtgaccagacccggagaattcgtggtgtgcaatctcgccagtctctccctcggtcatcttccggttacggatacctcttatatggaagagattgtttctaccgctgtccgcgcactggacaatgtgattgatctgaacttctatcccactccgtatgcacagctgaccaatcaaaaataccgaagcatcggacttggcgtcagcggctaccaccacatgctggcaaagcacggaattatctgggaaagtgaagaacatctgaaatttgctgacactgtatttgagacgatcaattatgcggcaattcttgcaagtaccaatctcgccgaggaaaaggaaagttattctctttttaatggaagtgactggcaaagcggcgcctactttgaaaaaagagactatcattcagaaaaatggcttgccctgcaaaaaaaggttgccacacagggcatgagaaatgcgtatctgctcgccgttgcacctaccagcagcaccagtatcatctccgggacgactgccggactggatcctatcctgaaacgttattttctggaagagaaaaaaggcagtatgctcccacgagtcgcaccggaattgtcaccggctacttactggtattacaaaaacgcccatctgatcgaccagacttacagcattcgtgcctgcggagtgcgccagagacacattgaccaggcgcaaagcatgaacatctacatcaccaatgatttcaccatgcgtcagattttcaacctgtatttgaaagcatgggaagaaggtgtaaaaaccatttactatgtacgaagcaaatctctggaagtagaagaatgcgaaagctgctcttcctgatctgaataagaaaaacaaggagaatttttatgtctgaattaaagaaaaagcctctgttcaatcccggcggcgacacggatatccgtctccgccgcatgatcggcggcaatacaaccaacttaaatgatttcaacaatctgcgctacacctgggtgaacaactggtaccggcaggccatgaataatttctggattccggaggagatcaacctgtcccaggatatcaaggattatccgaatctgactgagaacgaacgcactgcatacaacaagatcttaagctttcttgtgtttctggattccatccagactgcaaacctcccgtgcatcggtgaatacattaccgcaaacgagattaatctctgtctctcgatccagacatttcaggaatgtgtacacagccagagttacagttatatgctggactccatctgcagtccagtagaacgaaacgatattctctaccagtggaagaacgatgcgcatttactaagaagaaacacctttatcggagatttgtacaatgaatttcaggagaaaaaagacgatttcaccttgctgaaagttatgatggcaaactatattctggaagggatttacttctacagcggatttatgtttttctacaacctaagccgaaacgggaaaatgccgggctccgctcaggaaattcgctatatcaaccgggatgagaacacgcatctctggctgttccgcaatatgatcctggaaatgaagaaagaactgccagagttatttacaccggagcatatcgaaatattaaaggaaatgttaaaagaaggggttcgtcaggaaatcgcctgggggcattatgtgatcgggaatcagattgccggactgacaaaagaaatgatcacggaatatatccagtatctcggaaatctgcggttcacaaatctggggtttgatccgatctatccggatcaaacacaggaaccggacagtatgcgctgggtgagccagtattccaatgccaacatggtaaaaactgacttctttgaagccaaaagtaccgcctatgcaaaaagtaccgcactgatcgacgatctgtaaaaaagataccgggaacctcctgttttcacaggattcccggtatcttttctattcttctctgaacttttcagcctgtgctgcaatcagttcctgatcgttaaaatagttaatcttcatggatgctttcacttcctgaagtgtcttctctgcaacagcttcagccttttcgcttccttttttcaggatctcatacacatatggaatatccttctgatattcttttctgcggtttctgatcggctccagttccgcctgcagtacgttattcaggaaacgttttactttcatgtctccaagaccgcctcctgtataatgatcttttaattcctgcagatttgcatagtccggcaggaattctgcaaaatactctggtctgcagaatgcatccagataagtaaatactgtattgccttccagctttccaggatctgacactttgatgtgtgtcgggtctgtaaacatgctgaatacttttttctggatctcatccggctcctctgaaagatagatacagtttccgagtgatttactcatcttcgcttttccgtctgttcccggaagacgcagacatgcctgattttcaggaagaaggatctccggctctaccagtgtatctccataaacagagttgaactttcttacaatctcttttgtctgctccagcatcggaagctgatcctctcctaccggaactacgttcgccttaaatgcagtgatatctgctgcctggctaatcggataagtaaagaatccgaccggaatacttgcctcaaaattccgcatctgaatctcagattttaccgtagggtttctctgaagcctggaaactgtcaccagattcatataataaaatgaaagctcacacagctgtggaatctgtgactggataaacagtgtacacttttccggatccagtccgcatgccagatagtccagcgccacctcaataatattctgacgtaccttttccggattgtccgcattgtctgtcagtgcctgtgcatctgcgatcatcacgaacatctcatcaaaatctcctgtattctgcagctctactctgcgctttaaagaacctacatagtgtcccacatggagtcttcccgtaggcctgtcacctgtcagcataatctttcccataattagatacgctcctttattacatttttctcatagtctgcatccattataacaccattgcagagactttgccagcgaagattcaaactacctgaccagcttcatctccaaggtaaaccgcaacatctgaccttcttcctttccattttcctgatgttctctgatcagctctgcggtcaattttgcttccattacttctgccagctgctttgctaccgtaagtcccagaccggttccttcctgtgttcttgcccggtctttcctgtaaaatcgttcaaacagatgctccacatccgcctctgtcatattgaaggcatcattttcaaaacagatccacacctgctgcttttgctctctgacaaacacatgcaaaaaactctgtgcatatcgtccggcattctggatcaaattaaaaaaaatacgctccaacgccaatgcatcccctaacacttctatgatatgctccggaatctccgcctccaactccaacgcacgtttttctaaaatgtgataactatccatcagtgattccctaagaatccttcctgcatctgtttccttgatctccacttcataatctctggcactaagtcgggacaaatcatagaaatccgtcaccagtctttgcatggtctttgctttccgttcgatcgtctccaccatctccatgtccggctccttttgtcccttcatcagctttaaatatcccaatatcacagtcaacggggtacgcagatcatgactgatattctcaatctctgactgaaatgcccgctctcgcttttcatactcctgacgctctgttcgaatctgttccaatgcctgattgacagattgcgccatattttccagctctttatccggcatcgccatgtgaaggatctgattctgctgtatatctttcagaatatcccgaaactcccggtttgcctctttcattgctttttttaataagaaaaagcgagtggcaaagtagactgcgatcacgattgcaacgctaaataatacccataacacatctattcctccatcgcttctgaacttactctgatcactctcactcgctcgtctacttttatacttcttttttcctcaacattacaattcctgtcacaaccgcaagcactgttcccacgattcccacgatcacacattttgtcattccctgtgatgtctgccacagcacttcacaatgagacatatttacatccgatccaaactgaaacaggttcgcaggcagaagctgcgcaaaatcccacaaaaattctatgccccattgtgccagtaaaaccattccagccaacagtaacactttcggtatcacatatatgattactgcccacagcattgctgccatcacctcatttttgatatatgccagaagtgcgatccccaggatcatagatgcaactgctgttccatacactgccgggatctcggttaaaataattttcaggcttgtcggtcccgtatgttctaacaagaaccatgcacttcctatataggcaatcaataccaacgccattataaccgttgccgtcaaaactgcagtcatacatttccccaaaaacagcttttctctggaaatcccaaacgccactgcattttttatatttccgtttttatgttcctcctcatacaaaactgctgcaacaatcagacctgcataagtaaaaagcatcggacttcctgccagaaaactgaatgaaaaagaagtaatgtcatagggaaaatcctgcgttgtactactggccacacctgtcacatacaaaataatatgaaacaacaccggcaatactgccataattcctgtcatcacataagtcgagcggctgtgcatcactctgtagcattcactttttatataatttaacatccctgatttccccccttcttcagattcatgtaatacgcttccaaagatgcctgttttctggtcagctcccggataaaaattccatgttctgctgcaagcctgctgtagacttcaatatcctgttttggatttacaatacggattttcccatccggaagtactttgtatccttctcctgataactgttcttccagaaatacggcatactgctgcacgtctgacactgtaatctccacagaatccgtacatcgttcatgcagggtttccgcagtgatctgttccagtaatcttcccttacttaaaaagccatataccgttgccagctgctgcagttctgtcagaatatgactggaaagcagaatcgtgatcttcttttcttcgttcagacgctttaaaagctgtctgaattctacaatcccactggggtccagtccgttgatcggttcatctaagatcaacagctccggctctccgagcatcgccatcgccagtcccagtctttgtttcattcccatggaaagagtcttgcaccggcactttcttttttcccagatgcccgtcatgcgaagcatctcttctactttttcttttcccggaactcccttctggatccggtaatattccatattattttccactgtcaggtttccgaaaaagcccggctgttcgatcatcactccactgcgccgtctcgccctttgcagttccttctctccctgttctccaaacagcctgatctctcctgtggatgccgcactatgccctgccagaagcttcaaaagtgttgactttccggctccgttatccccgatcagcccgtaaatatctcctcgctttacgcagatatccacatgatcgagtgccaggacttttccatatgtctttgtaatctgtgttgtttctatgactcgttctctcaactttccttctccttttttgtgttttccctgtttccattcgtagtataccgttttctgttttaaggagtcctcaagaaagtttaaagaaactataaagattactccagcttaaacccgattccccagactgttttaatataagattcttccttatctgccttctggatctttttgcgcaggttgctgacatgcacattgaccgtattgtcttccccatagtatccgcctttccagacctgctcatagagatgttctctggaatataccttctgtggattctggatcagcaaatacaaaatgtcatattcatgcatagtcagtggaagctcaatgcctgatacttcaacttttcgggattgtggatataagctcagatttttgtatcgaaaaacctcctgttctgcttccatattctgtgcttcttttgtataacgccgcatggcagcttctactcttgcaattacttcctctggatcaaatggttttgtaatataatcatcagcgccaagccgaagcagctttaccttgtcctgcactgacactttcgctgataagatcagcacaggcatctcttttttctgttcctgtcggatctgctccaacacctcttctcctgttatccccggaagcatcagatccaacagcacacagtccggtaattcccgttccatacaaaacaatgcctctgttccggaaaatgcctgccgcacctgatatcctgccccttccataattttgaccagcagaccactgatatccgcatcatcctctacgatcaatatcttttgtccttccatacgctcctccatatcgtacactttttccacattgtatcattttcgcagtgttctttcaatttttgtttctgcacaacaaaaagagccattgcttcatttcacaatgacccttgttatgatactctgaacttcctatccaaactctctgcttcttgacacgcttggcactttctttttctctgtcgcatacacaaactgatacagtgtatatgccatcagaacagctcccatcacatcaatgacggagtgctgttttaaaaatatcgtcgcaaggatgatcaatcctgctaaaatataggctccgttgctgatcaccggatgcttcttcagctgctcactctgtgcaattgcaatacatgctgccagagaattgaacacatgaagactcggaaatacattcgtcggggtatctgccagatacaacatcctgaccatatctgtaaatatattatcccggggaaatacgaccggtcttaatgtcagtccgttcggaaatactgtagaaatcaaaagaaaaatcgtcattccgataaaactgagcttcgccagcttataaaacccttctacatctgtaaagaaaaaatagaggaataccgcagcaataaagacaaaccagagcagatacggcacaataaaatactcaacaaacggaatcttatcatccagtacggagtggatcacatgatactccgactctgctgtaatatgcttttccagatacataaaccacggcatatagataaacgcatacaggaatacccatgcatgtttatatttttttataaaatttttcaatgcactgctcctgttcattctgaccgctcccttaattgtaaaacataattctttttaactgccccgattatagcacgattttttttaatcaacaaggcgattcataaaaccttaacaaatcttttgattttctttctatttcttctaatttttttcgaaaatgtacatatcaaatctgctctttgcacgctgaagcatctcttctccatgcagtgtccatgccgcgattggtacatgaaaaatatgtttttgcatccacagactcaggttcttgctgtcctccattttataagagatgaaatccggtctgcagatacagttgctcaataaatattttacgcagaatctgaaaaaataatgcggtgtcttttcactttttacaagatcggaagacaactgtccccgcaaaatctgcttttgattctttctcatccactgcagtaccaggctgttaaatgactgtaccaggaacgttcccttataatcttccatcgtctttgccagacaacggcagatttccatatcttctgtcagcagctttacctcgatcaggatcggaactttcccctgcacaagatgcagaacatcctcaagcagcggaattggctctgcagtctccagaagccggaggtttttcagctcctcccatgtcttctcctctattgttccggagactttgcacatccgcttcagagaatcatcatgaaatactgctatcttcttatcttttgtcaaatgtacatccagctcaattcctttgtttgcccgtattgcttcccgaaaagccgccatcgaattttccggaattccgctctttttatcatgcagccctctgtgtgcccactgtgttcctctgaatttccagatctcccgttttctttccattcccgggaaaatcatataaaaatacgcgccaattacgatcaggatacatcctgtcagatatctccacatattcctcgcactcctttatgatgtgatcacccgcacctgctgcggcagtatatgcatccggatttcttttttcaaaaatactgcctctccgtccgtgtgcaccgctcttgcctgagaaaaccggatttttacttcttcgcaccggaaaatggaaatgcctttatgtcctacatgctttccctgaaatgccagaagcagtgttctgatcacctgccatcttttcagaccggatactacgatcacatccagttttctgtctcccggatccgcctccggacagaatttgaatccaccgccttcatacggctgattctggactgccgcaaaataggtgtctcgaaatacctgcatctctcctttgtccaactcgatctccgcccgcacggtatcatctttgatcaatctgtcgattgcaattcctgcataggtcagctttccaagtctgatcttattcagcgccgccttcaactttgaaacacttgcctgatgacaaatgatcgcatcaaatccgattcccgcactgactgcaaaccgtctgctcttctctccataatctacgacaccaatatccatcttctgtattgcctgcggatgcagaacaagataaagtgctttgacgggatcttttggaatcttcattcctcttgcaaaatcattactggatccagtcggaatatatcccaggatcacatggtcaaaattttgtattccgtttaacacttcatttaccgttccgtctccgcccagaacgaccagagtcttttcttcctggtcagccgtaagcatcgctgcgatcgctgtcgcattttttcttcgttccgtcagataaatctcatattttatctgactcttttccaattctttttgtacctcttcccagattgcccgtcctctttgggagcgggaatttggatttataataaaacaatatctcattccagaaacctccggatctaatctaatgtactgtccagatattttccgagtgaacgtgccatattcccctcaaaatctgcttctccgtttcgcagacaccattcaaacacgtttccgatcacaatcatacgaatgtccgtggtaaatgcctcgatttccacgttcatctgaatccttccttcttttattgctttttccacatagttctgtactgtcacgatcggatacggacgctccgtccggctgaccggattgagcgcctgattcttcgtatcatagtatcctgccataaactcaacacccagttccttgcaataagaaacataatttaaatatacctggatgatcgttctttttgcatcctctgcattttccggcaaatccagaagatccggattaatgctcggctgatcctcgatataataagacagaagatcatcctttgttttgaaatggtgataaaagctgccgttggacacaccggcctcttcacatatatttttaattgataatgtctcatatccactgcgctgcagaatccgctttgccgccttgaaaatcttttcctttgtttccatggactttttctgctgcttggataatcctgttgtttcttccatgataatcactccttatttgcacccaagtatatcacaaatcgaaaagtcattcaagaaaacagagcatgctctaatctatttttgtttccacacacaatatgcctcaaacgcagatggaatcgaatacttttcctttaatacttcttcttttgcaaaaatcatttccttgctgcagtttttctccaactcatccactcggatctcataccctttcatgtgccattccacatgactgaaaatatgcttcgcaaccggaagttttttgatacggatcggagaaaggccaatcgacttgctgtactcgatcacttcttgttgactcagccagccttccagattcggcagttcgtataatcccgcgagaagacctttgtccgggcgtttctgaattgccagagtatcactgtcatgaaatacaagtaccgtcctcttttcgatttttcttccctttgcttttgttttgaccggaagctccattgcgattccttcttttctggcacggcagatctctgctgccggacagatctcgcactttggctctccgtttggcacacatacgatcgcgccaagctcgatcagtccctgattaaaatcccccggacaatcttttggaatcacttcctccagtgccgtctctatctccgtacggactttggctttcataatatcttctctgcttgccagaatccgggacaccacacgcagcacatttccatctaccgccggttttggaatcccaaatgcaaaagatccaatggctcccgccgtataatttccaattcctttcagtgcatggatttcttcatatgattccggaaactgaccgccatactgctcaaccatctggatcgcagctttctgcatattgcggacccgattgtaatatccaagcccttcccacagcttcatcagccggtcctcttttgcattggccagatccgtgatcgtcggaagttcctttaaaaaccggtcatagtatggcttcactgcttccaccctcgtctgctgcagcataatctcagacacccacacacgatacggcgtcacatcatgcctccacggcagatcccgcttattttcacgataccaggctacgatcggatctacggtttcccacaaaattgggttctctaatacaaccggaacttcttcatcaattttgatcgaatcttctgtcacctgacagtcatacgccagaatctttacccctgctgcctttgcttttttcagtacttcaccaaattccggctgtgtatccatattcggtgtaaaatagcggacgcctttcatctggatcaccagaaatacataagcatcgtatccttccttttttgcacggatcagttcttccacatgctttactgcccgctcactcggcgcatccggaaaacgcacgacaccatcctcttccagggtcactcccttgacctcgataaacgctttcgtttctcccgactccacataaaaatcaaaccgggagttaccgtatgttgtctccgggcgaaccgccaccggttcaagaaacagattaccggcacgcagccattcttccacgactttgttggggatctgggaatccatattgatcagacgatctccttttctcaccccgatcagatcccattttgtctttcgctccgggttgtcactctcctgcacaaaaatctctgcttcgggtacaagaagttccgcgcacctgcctgtattcttcacgtggatcgtctcttgttttcctgcaatcctggcatacgcaataaaacggttcggccgttccagaaatgtcgcccgctctattctctcatatttcataatcatctttctcctgttttgccaggcatctctcccagcctgactttttcaagctgccttgcgtcttcctttgtcagataatcaaacagataatttctgtcattttctacttttccaagatgttctcttcgaagttccaaaagcgcaagctccacttcctctttcaatcccaaagcagacatacgcgctgcgccgtgccccagaatgatcacctgttccaacgcatctgatgtggcaactgtcacatggtgatttcttccgatcctgcgaactgtcttttcaatatactgatccgcagtctcggcctcttttgtatataccacatggatgttgtgatatttcatcacagatcccgaaccgccttctaccttgtaggcatcaaaaaccaggatcaatgtacattttttatatccctgataattacacagcacgtccatcagcttgtctcgggcacttttcaaatctgactttgccagctcttttaactcttcccatgcaaaaataatattgtatccatctacaaggagatattcttcctttttttcttctttgcgtgatgtccacttatcatccgctgccggctgtgcttttgcccttaccattacgggtgtccggttctttttcaccggatccggtgttcttgcgtaaatcgcatccagttcttcccgggtcagttcgatctgggaagaagtactgcgtgtctgacgcaccaccgggcgcttcttctcttcggaaacctcattgctctccagcgtgttttccagatgcatatacgcttccacttcatcccagttcactacaaatccggctccatgcgcgcagaacaccgagcctgtcggattttccagatctgcctcagggtcatatccgatttcttccacgataggctcctgatccggacatttttcatagccttttaaccgacaggacatccgtcctctccctccggtatacgaagtgagctctgtctgatatccgcgcatctgagacaccggggcacacccttttaaaatggagatttccccgtctgcgacaggcggctcaaatgtcccgcttcttttctggatatccatcatagcccgtcccacgtgctctggaaggagctccatctcgaactcataatacggctccagaaggacactctttgcttttctaagcccctgacgcactgcacgataggtcgcctgtctgaaatctccgccttctgtatgtttctgatgagcacgaccggataccagtgtaatcttcatatctgtgaccgccgatccggtcagtacccctttatgctctttttcttccagatgagtaagaatcagacgctgccagttgcgggcgagaatatcttcactgcagtctgtaaaaaactgcaaaccgctcccacgctctcccggctccagtaaaagatgtacctccgcataatgacgcagaggttcaaagtgtccgaccccttcgacaggatcctcaatcgtctctttatagaccactttccctgttccaaattccacacgtactttaaaccgatcccagataatgcttttcagaatttcgatctgcacttctcccatcagctgcgcatggatctcaccaagccgctcttcccatacaatatgaagctcgggctcttcctcttccagctcttttagattgagaagcatcttgtgtatatcacaatccggcggcagttcgatccggtaattcaggaccggttctaaaatcggcatatcagactccgactctgctcccagcccctgtcccggatacgtatcagaaagcccggtaactgcacagacttcccctgcatgtacctctgaaagcatctcatattttgcaccggaatagcggcggatctgattgatcttctcctccgtatccgtgatgatctccctgacctttatacttcctcctgtcacttttaaatatgtcagtctgttcccctgctcatcccgtccaatcttgtatactttcgcaccaaattttgcgggatactgtctctcctcggtcaaactctcaagcgcatccaacagttcttccacaccttctgtgtgcagagctgagccaaaataacacggaaatacccgtctctgactgatcaaatctgctacctgctctctcggaagttctccgttctccagatactgctccagcagcccttcatcacacatggctagctgctctgctgcctcttcactgctttcacttccaaacactttttcaaaatcaatacagtgatctccaaatcgctttttcaattctgccagaacgcgttctctgtctgttcccgcctggtccatcttattcacaaaaagaaacaccgggatcttgtactgtccaagaagtctccacagtgtctctgtatgtccctgtactccgtctgcaccactgatcacaagcactgcataatccagaacctgcagtgtccgctccatctccgcagagaaatccacatgccccggtgtatccagcagagttatccccatatccttccaggaaagcactgcctgttttgaaaaaatagtgattcctctggaacgttccagatcataggtatccagaaatgcgtccttatgatccacccgtcccattttccggatacttccgcttatatagagcatactttccgacagtgtcgtctttcctgcgtctacatgagcgaggatgccaagacagatatgtttttttactttttcagactcttttgagctcatgaaaacgccccctcttgtgattacattgatgttgtattatatcacaaaaggaggcgatagtcgagatacgttctcgttttcactcttctataaaatttttgacaaaaattctttcagtctcggatccttcggatgctcaaagaactccttcggatttccttcttctttgatctgcccttcatctacaaacacaactcttgtggcaacttcttttgcaaatcccatttcgtgtgttaccacaaccatagtcattccgtctcttgcaagctgtttcatcagctccagaacttctcctaccatctccggatccagcgcagaagtcggctcatcgaacaacatcacatccggattcattgccagagaccgcacgatcgcaatacgctgtttctgtccaccggaaagctgatccggatatgcatctgccttgtctgcaagtccaaccctctgcagcagttcttttgcttttttctctgcctcttctttcgacatctttttcaatgtcacaggtgcaagcatgatattttccaggatcgtcttatgtggaaacagatggaaatgctggaacaccattccgatcttctgacgatgaacatcaatatctgtctttgggtctgtaatatccgtcccttcaaataaaacagttcctcctgttggaacctccaacagattcagagaccgcaaaaatgtagattttcctgatccagacggtccgatcacaacaacgacctctccttttttgatctctgtagaaatcccacgcagtacttccaactttccaaatgcctttttcagatcctgaacctggatcaatacttcgttcttatcgttcatttgtgcgcagtctcctttccagtttgttcataaagaatgtaagcagcatcaccagtgccagatagatcactgccgctgtgattaatggaataaatgcctcaaatgtacggctctgaattaccattgccgcctttgtcagatcctgttctccaatatatccgatgatcgcagtctctttgatcagcacgatcatctcattgaccaacgccgggagtacatttttaaatgcctgcggcataatgatcagacgcatcgtctgtccatagctgagcccaagacttcttccagcctctgtctgtccttccggaatcgccataataccggaccgcacgatctcagctacataggctccggagttgataccaaatgccagccctccgataacgatggaattcagggaagaagccccgaacacaacgagatacatgaacaatacctggatcatgctcggtgttcccctgataatggtcagatacactttacagattgcatttaaaattttgaattttccggtcttatcatgcagagaacgaatgatcgccacagtaaaaccaatgatcacacctactaaaagtgcaaacaatgttacaaggatcgtaactttcagaccgtttaccagcaaaagccaccggtcatcttcaataaagttctgatataacttttctgaaaagctcatgtttttacctctcttgtatgtttctttaacagttcaaaacagggctgcctgatttttgtcccgcacccctgttattgtatctcattaccattctgtgattattttcttacgatcactacctggcttgcatttgcatatgtgtctgtgaaatctgcatttttctgacgctctgcatccactgtcatgccggctgcaccgaaatctgcctttcctgctgcaatggatggaagaatagaatcaaattccatatccagaatctccagatcatatcccattttatcacagattgctctggaaagatccacatcgattcctacaattccgtcaccttcatgatactcgtatggttcaaattctgcattcgtagccataacaagtgttcccttggagtgatccacatctgccggagattcatactgatattttccggtgtcatctccaatatagtttccgatgatcttatcaactgtaccgtcttctttcagttcctcaagtgctttgttcatctcatccagcaattctgtgtttccttttttcacacacattgcatattcttctgtttcaaaaacgccgtcgataatcttcagatcctgattcttttctacaaattttgctgccggctcagaatcaattacgacacagtcgatctttccgtttttcagtgcctgtattgcagttgatccttttggataacgcttcatctgagagtctttctctacctgctcggagcttaagatatctcctgtcgttccctgctgaacaccgatcgtcagtgtcttaagatcctccggtttctcaacattcacttcttttttctctgaagaaccacatcctgcaagcgaaaccatacatgccgctgccagaacgattcctgtcaactttttcattttcatctttcattcctcccaaaacaaaatacacatagtctgtataatcattcattttatacatatatgataccatgtttttacgaaattgcaagactaattatgcataaattatcatttttatacgtatattttttgtatataattcatttttatgcaagcagtgcatgaatcccgaaatacaggaacacaataattccaagtacgatacgataatatccaaatgccttaaaatcatgattctgaatgtattttaataaaaacttgatcgccagaatggacacaacaaatgaaacaacacatccaagcagaagaagcccaagctcagtccctgtaaagtcaaatccaaagtgacgaagttttacaaggctggcacctgccattgccggaatcgccagaaagaatgtaaaatccgctgctgcagttcttgacacgcccagtgccagtgctccgacgatcgttgctcctgaacgggaagttcccggaatcatagcaagcatctggaatactccgatccagatcaggaccggaactcccatctgggaaatcttggtgatctgaggtttccttcctttgtgtctgttctcgatcacaataaacagaacaccgactacgatcagcatcgtagcaactacataagaattattaaatttttcttcaataaaatcattaaacaagactcctactactcctgccggtatggaagcgatcaccactttcacccagagctgcagcgtcattcttttctgcttttctgtctttttcggtgaaaacggattcagccggtgaaaataaatcacaacaactgccatgatcgcacccagctggatcaccacgttaaacatatccagatacgactggctgaaattcagcttcacaaattcttctaccaggatcaaatgtcctgtactgctgatcgggagccattctgtaattccttccacaatccccagtatgattacttttaatgcttctaacatatctctcctcctatctcaaagcaaacttttcgactgcttttgccacgccttcttcctcattcgtatccgtcacataatctgctaccgcttttacactttcctctgcattgcccatggcaactccaaatcccacggcctttaacatttcaagatcattgtccccgtctccgcatgccataatctcatctctgtcaattccaagtctgtgcccaagctcaagcattccaattcccttatcgattccctgagcattgatctcaatgttatttccaagcgatcccgtcaataccagccccggaatctcttccagctcttttctggcacgctctatatcctgcatatccgcaaacataagctgcagtttgtctgcatcgcgctttgcttcgccataccattttacaatagacggaactacagtcctggtagaccttacatactcccacatatgcggattcttgtgataacgccaaatttcctgtagctgattttcctgcgcatatacctcccggtcaaagtacgcctcttgtaatgtatcatacttttctgtgatttccaacgctttctttcctttttcataaggaaccggatgcgaaagaatcgttttttcatggatcaaatcgtagattctcgccccattggtcgtcagcgcatactgcattccctgtatcgctcttacctgtcctggaataccggtaagcggccgcccggtcgctaccagcacaatgatcccctgcgcgatggcctcctccagtacactctttgtatgatcagttacctctttttttgaattgagcaaagtcccgtccaaatccagtcctatcatttttatctttttcatgaagcctactcctcatctttctgttactgctcacagtaacctctttcttaaagttttgtaacttattttatcaaaatttgcgttatttcgcaatttatagtataatagcgaagcagacttttttatagaaaggaattaaagttatgaaatcaggcttaaaacgcaggctgcaaacaggtactgcacttatttgctccctcgcaatggctttttctgttctccctgtttccgcagaggaaagcacccaaagcctcgaaagcaaaacttctgatctggcaggccagctggccggtatcaatcaggaacttgtcgccatcagcgatcagatatctacgactgagatgcaggttgagattacgaatggcgagattcaaaggacaaaagattccttagccgacgcacaggcaaaagaagctcaacagtataatgacatgaagacacgtattaagtatatgtacgagaccggaagcgcatcacttctggaaatgctcttttctgcagaggatatgactgactttctgaacaaagcagattttatccagaacatcagcgactatgaccgcaagatgctcactgaactgcaggagacgaaaaatcaaatcgcagaagaggaaaagactcttcaggcacagcaggattctctggtctcactccagacaagtctggataagaagcagtctgatctcgaagcgaaagccgctgctacttctactgatctggctacatttcaggcacagcttgcagcacttagagcacaggaagctgcagaactggaagcaaaaagacagcaggaacttcagcagcaacagcagcaagaacagcagcaggaatcggacaagccttcatccggtgacggtaactcaacagtgactccgacacctccgactacaccggattccggcggagatatcattcagggaggaggctctgatgcaacccatgatgagctcactacctttgccgctttattggactgcgaggccatacatgattataattccatgctggctgtagcgaccgtgatcatgaatcgtgtggaaagtccgcttttcccgaattcaattcacggtgtcatctatgcaaccggacagtttgaaccggtctggagcggaagacttgattctattctgaattccggtccgtccagcctggcacttcaggttgcccaggacgcagtcaacggagcaagactttcttctgtcattgactgctacttcttcctgtatgcaggtggtaccgatcgtccgggagtcaatgtcggcgggaaccttttcttccagagctggtagaaatttatatgtacataaaaagtaggctgaaaatcggtttgttaataccgatcttcagcctcttttctattggtaatccataacatcaatccatctcatcaggaaatctttctcaagcgcattttccttggaaagctgtgctgctgcgacgatcggaagccactgctgtacatactgcattgctgtatcactcttcttacagaaaatcttcaggtacagatctgctttttcctgactttccagtgcaaacaaaagataggtcatagctgcatctgcacttgcatttccctgtgtcacatgagcccagtcaatcacagtcatcttaccgttctttccaacgatcacgttgctcggattaaaatctccgtgacagatcttgtcatgcttcggcatactttccagtcgtgtcatcagttcatatcttgtcgtcgcatccaggacttttaatccattgatctgccgggcaaatttatctttcatcttgtttaaaagaggtgcctttttacttgtaacactcagctgcagatccacaaaatcattcatatatttttccagatttgtaggatcgaccttcatcatctcttccattgtcttaccatctttgtactcgatcaccagagcccattttccatcgatctgtgtcacttcttttacactcgggatatccagtcctgcttcttcaacacgggcagtatttaaagcctcattcagtacgtctgacttcggatgctcttttgcaaatatttttacaattccttcttcacatttgtacacttctttgtaagaacgttttacgattaagtttttttcttccagtttcataaaaattgcctcctgtcatacattctatcccgcccggcaaatccttccggtgtggtatctgtttttcttttactgaccttattatagctcctgcttttttgaaatgtaagcccctaaagtcaactttgtgcaatttttcacgattttttttctatcgaatataattgttaatttcttaacttacaaacaattttcttcttttatattttcacaaaaagaggacactcctcccgccatttctggcgtttggaatgtccttctctcttattttccttaccggaaattattttccatagtagcatttcaggtaaagttctttgatctctttcatcagtgggtatcttgggtttgctcctgtacactggtcattgaatgcctgctctaccatgtcatccagtgtgtcaaggaagtatttctcatcgataccatactctttgatggatttcttgattccgatctgttcttttaatacttccagttttgcaaggaagttctcaaatacttctttgtcatcttttcctgtgcatcctgcaaaacgtcctaactcagcgtatcttgcaagtgcatgtggatactgatactgagagaatgttcccatcttagttggaacctcagatgcattgtatctcataacttctgtcagaagtactgcgtttgcaacaccgtgtggcagatggtggaatgctcccagtttatgagccatagagtggttcaatccaaggaatgcatttgcgaatgccataccagccatacaagaagcgttcgccatctcttcacgtgcttttggatcatttgctccgttctcatatgctgatggaaggttttcaaataccatcttcactgctttcatagcaagaccatctgtgtagtctgtagccatgatagatacaaatgcttcgatcgcatgtgtcataacgtcgatacctgatgcacttgtcagtccttttggctgtgtcatcatgttgtcaacatcaacgattgccatgttcggaagtaactggtaatcagccagcggccattttacacctgtctctgcgtctgtaatgatcgcaaatggtgttacctcagaacctgttcctgaagatgtcgggattgctacgaagtatgcttttttacccatctcagggaatgtgtatactctcttacggatatccatgaagtccatagccatatcttcaaagtttgcatccggatattcgtacattacccacataatcttagcagcgtccattgcagatccaccaccaagagcaataattgtatcaggctcgaaagaacgcatcatgtctgcacctttctgtgcacactgcagtgtcgggtccggagctacttcatagaagcatgtgtgctggattcccatagcatccagtttctcttcgattccttttacatatccgtttttgtacaggaatgagtctgttacgatgaatgcttttttcttgtgcatgattgttccaagttcatccagtgcaaccggcatgctgcctttcttgaagtatactttttcaggtgttctgaaccagagcatgttctctctcctctctgcaactgtcttcacgttaatcaggtgttttactccaacgttttctgatacggagtttccgccccatgaaccacatcccagtgtaagagatggagccagtttgaagttgtaaagatctccgataccaccctgagctgcaggagtgttgatcagaacacggcatgtcttcattgctgcatagtgtttttcaatcttttctgtctgtgccggatgaacgtacagagcagatgtatgtccatatccaccgtctgctacaagctgttctgcttttgcaagtgcttcgtcaaatgtttttgctttatacatagcaagtacaggagataatttttcgtgagcaaattcttctgaaatatctacagactctacttcaccgatcaggatttttgtattctcaggaacatctacacctgccatttttgcaatctcatatgcagattttccaggaatcttgctgtttaatgcaccattgatgataattgtcttacgaaccttatcaagctcagcgccttttttcaggaagtagcatccacgatactggaattctttcttcacttcttcataaatgctgtccagaacagtaactgactgctcagaagcacagatcataccattgtcaaatgttttagaatggatgatagagtttactgccatcttgatatctgctgtatcatcaatgataacaggtgtatttccaggtccaacaccaagtgccggttttcctgaagagtaagcagccttcaccattccaggaccacctgtagccaggatgatatcagaatctctcataacctggtttgtcagctccagagacggtacatcgatccatccgatgattccttccggtgctccagcttttactgctgcttcaagaactacttttgcagcctcgatcgtacatgcttttgcacttggatgtgggctgatgatgatcgcatttcttgtctttaaacagatcaatgttttaaagattgctgtagatgtcgggtttgttgtcggaataactgctgcaacaagtccgatcggctcagctactttcttgattccgtatgcagtgtcttcttcgatcactccacaagtttttgtatctttatatgcattgtagatatactctgctgcataatgatttttaatgattttatcttcaaggacacctctctgtgtctcttctactgccattttagcaagcgggatacgcatcttgttagctgccattgctgcttcatagaaaatcttatcaacctgctcctgagagaattttgcaaattctttctgagcttcgcgcattgctttcatcttcgcttccagtgtctctacgctgtctacgattgcaggtactcccatctcttcttttttcttcgccatttcaataatcctcctgtaattgacttggtttcttaattacaggtattagtatactttcttgttaaataattgtcaatatagcttttgacaaatatttaacgttatctttttaacgtcaattggtatatttgcacaaaaaattaattttttatcaccaatggaagatcaccggtgtccctggttcgatcatattgaagagcgcccccgcctgatccaatggcatgttgatgcatccatgagaccccgttcccggaatctgatacaatgtcccgccaaatgcagtctgccagattgcatcatgaaaaccgactccacttgacgtcacctgcatccagtatgcaacatccgtctcatattccggctttcctgtttccggcttaatatctcccaccagtgttgcatcccgctgcttccacatcagagaatatactccttccggtgtaatccttgatggaatcggctctcctgtcacaacatccgtctccagtaccacttgcccgttctgaacataccacatatgctgtgcactcatatccacttctgcatacgtatttccccagtcctgcccggaatgtgctgcggcagtaccgcccgcataatatgcaggctcccttgtgactacttccccgtttaaaatgctgttctgcagattcacaagctctgtatcctcatcaatagaccatccataagtcccgcccgtcacagttgcgctctttccggccggcgttgtaaaggttctggtcgttccctgtgtatcatacttgtctccaaaggcagtaaaccactgcttcatcgcctctgtattgagagaaaccttcatttctccgtctacctgtagccactgtgagatcagcgctttatctactacgactggttcattcatcggatatgtgatacttgcatttacatatttattcattgcatcacaggcttcctgtacttccttggaatcctctacatattttggtttcgcatagcacttggtttccaccatatccaactgtggctgaaactctgtgatatgaacttttacctgctctgtaagacgttctttatccacggcatttccatatacttccggtttgatgacatactggtttccatcaaattccggctttgcattctctgccggtgtctgctctgtctgcagacatgaaagctgtgagatccgctgattcaaggattcctcattatatgacacattgactgaaacctttctggaattctccgtaaagaaagctttcggccaggcgaatccattctgatccttcaacaatttttctgcttctgtccccgctctgtattccagtccaatctcgcttccgctgatcacatcctgtcttccttcattttccaaaattgtaagcttataatcttttatatttgtctggagatacttttctacatcacttgctgtcttccccgaaaagtttttaccgttaattttcgtattcacgaaaaagtgactcatgaaatacacagagattgcaacatagatcaaacagatccctgcaagaacccctcctgtgatccacaaagcctttactttaccgtcttttcccgtctttcttctttttactgcctttatttttttcgcttttcccatcctaaatgttccccttttacattctcttatgtaataataccgtaatacagtatcacctatatattagacgaaaaagattacaaatgtgttgcaaaaatcattaaattttttttaattttagatgaatcaaaaaagcactcgaaaaccatctctgatcttcaagtgcttctcttttgctattttgattactgattaaactaactcgatcagtacttccatagctgcatcacctttacgctggccaatcttaacgattcttgtgtaaccaccgttgcggtctgcatattttggagcgatttctgtgaataatttatccactaaatcaacttttttcatatttctcttgatgttgttctttggagcttctgttgctgtgtaaagaactttcagcatctgtcttcttgcgtgaagtctgcttggcatatcttttttgattgtcttttcaacttcttcgtaaacagttacttttttaccgtcaacaacttctttcactcttctgcctttgtcgtcttttttagcaactttagcttttacagttacttcttcgaagttatctttttcttttacagctaaagcgatcagtttttcaacttctttacggatctcttttgcttttgcttctgtagtaacaattttaccattgttcagtaatgctgttacctggtttctgatcaaagcttttctctggctggatgttctgccgagttttctatattttgccatttttatggtcctccattaaataaacatttggttttgcatcttcgggcttataaatcaaatgctcccgccacgctcttcgggcttactgacgggataattttctttattcctctccctgatttaactcaaggtttaattcttttaattttgccagcacttcttccagagacttacgtccaaggttacgcaccttcatcatgtcttccggtgtcttgtttgtaagttcttctactgtgttgatgccggctctcttcagacagttgtatgaacgtacagaaagctctaattcgtcaatgctcatctccagaactttctctttctcgtcatcttctttttcgatcatgacttcagctgactgagcaacttcagaaaggtcaatgaataatttcagatgttcactgagaacttttgctgcaaggctgactgcctcatccggaagcagtgttccctttgtccatacgtctaatgtcagtttgtcataatctgtaacctgtccgacacgagtattctgaacggtcatattgacacgttcaaccggtgtatagattgaatcgatcggaatcacaccaatcggcatatcctcactcttgttcttgtctgcgcttacgtatcctctgccttttgtaatggtaagttccatatacaatttgctgtctttaccgccgctcaatgtagcgataacctgctccggattcataatctcaatatcagaatctgtctggatatcagcacctgttacaataccttctccttcaaactcgatatatgcagtctttacttcgtctgattctgatgtatttttgattgccagggactttaagttcatgataatctctgttacatcttcttttacacctgggatggaactgaattcgtgcagaactccgtcaatctttacagaactgatggctgctcccggaagagaagaaagcatgattcttctcagggagttacccaatgtgattccgtatcctctctccagaggttccactacaaattttccatattttttatcttctgaaatttctgtaatttcaatattcggcttattaaaatcaaacactacacagaccctccttatgggttaatatatgttgagggggtacaatgttaaatctccggattctaaaacttctgctactcactgagagattatttagaatataactcgacgattaacatctcatctacaggaacatcgattgcttctcttgaaggaagctcttttactgtacctttcaggttctcagcatcaacttccagccagtcaggaatcatgtttccacctgttacttccagaatatctttgtatctctggcagtctttgtgtttttctttgatttcaatcacgtcaccagcttttacaaggtaagatggaatgtttacctgttttccgtttactaaaacgtgtttgtggtcaacgatctgtctagcttcttttcttgttcttgcgaatcccatacggaacattacattgtccagtctggattccagaagaatcatcaggttttcacctgtcataccttccatctgttttgcttttgcatagtagtttctgaaaggtttctctaatacaccatagatgaattttgctttctgtttctcacgtaactggagaccgtactcgctcatttttctattagctctttttaactgtctgttagattttttgttgattcctaaatagattgggtccatacctaatgaacggcatcttttaagaactggaactctattaactgccatgtttatcctccttaaaaatcagcggaactgcagtaatccgctatgctcattgctcaaattctctgttagctcacctgcagcaaaaaactgccgccaagtccgaaattagactcttctgcgttttggtgggcggcatccgttgtgtggtaccggtgttacgtctttgatacttactacatcaataccgcaagcctgtaatgcacggattgcagcttctcttcctgatcctggaccctttacgaaaacatcaactgttttcagaccatgtactaatgctgcctttgctgctgtttcagctgccatctgagctgcatatggagtagattttcttgaacctctaaatcccagaccgcctgcacttgcccatgaaagtgcatttccctgtgtatctgttaatgttacgattgtattattaaaagatgactggatatgtgcttgtcctcgttcaacgtttttcttgacacgtttctttgtcactttttttgtaactttcttagccatttaaactaacctactttcttgaattcttgtattccccacttgacggggatattactttatattattttttcttatttgctacagttctcttaggacctttgcatgttcttgcattagtctttgttttctgaccacgtaccggaagtccttttctgtgacggattccacggtagcatccgatttctttaagtctcttgatgtttaactggatttctcttctgagatcaccttctacaacctgagtctcatcaatcacttcactgattttcttaacgtcgtcctgtgtcaaatctctaacacgtgtatccggatctactcctgcatctgcaaggatacggatagcggatgttcttccgattccgtaaatataagtaagtccgatttctacacgtttgtctcttggtaagtctacacctgcaatacgagccatgtgtctttcctccattttgaatctaaatttaatattgtctttaactgggtgtgtcagactttgccgaatcacaccaggtgcaaatatgatgcaccctttcccgacacgtaaatccttttacgcaaatgaccgtcgggtattagaagcaatatacacacacatactgtcctgccgaatgcagaagaaagaacctgtatccaagttctcgtgtatgtgtcaagaccaccagccttcatatgaggcaatctgccaaatgcgtagcagtggtgtatccttactgtatattaaacagctctacacacttcctggtgtgtcgcgctgtcagccgcctaattcatttcacaaaccagcaattatccctgacgctgtttgtgcttaggattctcacagattactctgatgcttccttttcttttaatgattttgcatttttcacaaattggttttactgatgatctaaccttcatgtcaaatcctccttccatcctttgctaaaacccttacgtttccaactgcttttggacacacctacccaaaaacagccacttgatattatagcaccctatatctaataaagtcaatacctttttacttatctctccaaacaattcttcctttgctcagatcgtatggagacatctccaatgtcaccttgtcacctggtaaaatcttaataaaattcatacgcagttttccactgatatgagccagcacaatatgaccattctccagctctactttaaacattgcgtttggcagtttttcaactacgactccttcaatttcgattacgtcagcttttgacatactaaatcctcctgcgctcttgacgcttccacttctcatccaatagatttggaatactttcttattacatttctgattgtttcatcatcggtcaccgaggtactgcaaacctttttgatcggctgcacatgcctcaggtttttcttctttgcccggcagaccggacgaaactgtccgtctgccagatatacatattcatctttgacacaaattataacatatatacaattcttatcatgccctgctttcgaacgcgcaagcattcccggttccagctgcatgaattactctcccagaatctgaacgattgctgcaaacacatcattgatatcgatcgttccatctacttcttttaagattcccgcttttgtataatagtcgatcagcggctgtgtctgctcgtgatatactccaagacgtttcagtactgtttccggtttgtcatcatctcttaagatcagacttccaccacatttatcacagacatcctctttctctgtcggtgcatatacaatatggtatgttgctccgcagtctacacatgctctgcgtccggacattctgtttacaatattttcatccggaacttctacattgatggcataatccatcttctgtcccattgcagccagagctttatcaagcgcttcagcctgtgggattgttctagggaaaccatccagcacatatcctttggaacagtcttcctgatttacccggtctaccacgaggtcaactaccagttcatccggtacaagaagtccctgatccatatatgtttttgctttctgtccaagctctgttccgtttttaatattggctctgaaaatatcacctgtagaaatatgaggaatatcatatttctctgcaattttcttagcctgtgttccttttcctgctccaggagcacccaacataataatcttcataacagtatccctccatatagcactttaacccgccgtattccgtcccaaaaagggacagcatacaacgagctaaattgtctcatttcatatccaagaacccttttactttgatgagcccttgctgctcaggaaacctgagtagttgcggacaagcatctgcgactcgatcttcttgatcgtctcaagtacaacacctacgataatgatcagtgaagttcctccaaaagaaacattcgcaccaaatacaccgttaaagaagaacggaactacctgaacaatcacaagtccgcatgcaccaatgaatacgatacgattcaaaattgtctgcagatattcgactgttggttttccaggacgaattcccggaataaatccgccgctttttttcatgttgtttgcaatttccagtggattaaatgtaatcgatgtatagaaatatgcaaaaaagattgtcagcgcaatgtaaatgatcagtcctattgaatatactaaattatcaggatcacaccagttattggaattcattgtccgaagaatctgacttccccatccgtttccgtcacccttgcctaagaactgggcaattacaatcgggaactgcatcagtgaagatgcaaagataaccggaataacacctgaagtatttacttttaacggaatatgtgtagccttgccaccatatgtccttcttccctgtactttctgggaatactgtactgcaatccttctctcaccatcctgcagaatgataacaaataacacaactgccaacagaattgcaagaataatgattgctgccatagcaccctttgccagagtttttcctttaataaactgtgtataaagcgtcacaaaatcattcggtacacgggaaagaatatttatcaacagtacgatagaaataccatttcccacacctttttctgtgatacgctcaccgatccacatcaaaaatgcagaaccggctgtcaatgtacacacaacaatcgctacatttacaaagttaaattcttccaggagtccctgacgaccaaaaccgatagacattgcaatggattcgatcagtgcaagagcaactgtcacataacgtgtaattgccgcaattttctttcttccctcagcaccttctttctgcatttcctcaagttttggaattgcaattgtcaaaagctgcataatgatggaagatgtaatgtatggtgtgatgctcagtgcgaagactgacatccttgtgaacgaaccaccggtgaatgcatcaaaaaagctgtatgcaccgttattctggctcgcaagtaaattctgaatgtaagtcgggtcaactcccggagtcgggagctgagaaccaaatcttacaacgatcagcattaaaaatgtatagaaaagccgttttctaatgtcttctatttgaaatgcttttcgcacagttttgagcattagatcacctctgcttttccaccaagggcctcaatcttttcaacagcacctgcactgaatgcatttgcctgaacagtgagtttcttagttaactctccgtttccaagaattttaacaccatctctaggatttgttacaagaccgcactcgatcattgtttctactgaaactgttgcgccatcttcaaatctctctaatgcacttacattgataccaacgatttctttagagtttctgcatttgaatcctctctttggtattcttctgtataaaggcatctgaccaccttcaaagcctggtcttgttgctccggaacgagctttctgacctttgtgacctttaccagctgtcttaccatttccagaaccgtgtccacggcctcttctgaaattatcgctgtgcttagaaccgtctgccggtcttaagttagataagtccatgatattacctccttatcgtctgaaattaagcttcttcttcaacttttactaaatgtctaacctgctgtaccatacctctggtagctgcattatctggtaatacgactgttttgttcactttctttaatccaagtgcctcaacagttcttttatgctttggtacggcaccgattgtagactttactaatgtaacttttaaatttgccattttcatttacctcctagcctacgatctcttctactgatttgccgcgaagttttgctacttcttccggagtcttaacgtctttcagacctgcgattgttgcaagtacgacattctgtttgttgttagatcccagagattttgtacggatgttcttgatacctgccatctcgataaccgcacgagccggaccaccggcgataactccagtaccttccggagcttttttcagcagtacggaagcgctgccgaattttccgatcacatcatgtgtaatgctctcgttttcatctaatgcaactttaatcagatttttagctgcatcttcttttcctttacggatagcttctggaatttcagtagcctttcctaaacctgcaccaacatggccttttccatcgccaacaactactaaagctgtgaatctgaagttacgaccacctttaacaactttggtaacacgtttgattgataccactttttctgttaattctaaattactagcatcaatgcgttcctgtctcatctgtgttctcccttccttagaaattcagtccagcttctctagctgcatctgctaatgctttaacttttccctgatagatgaatccgcctctgtcgaatacaacatcagtgattccttttgcttttgctttttcagcaattacttttcctaagtatgctgctgcttcaacgttgttggttttttctaattctgcttttacatctttttcaagtgtagacgctgcaaccagagtgtttccaactgtatcatcgataatctgagcatacatatgattattacttctaaacacagccaaacgtggtctttcagcagtaccgctgaaacggttacgtaatttcatgtgtttttttctacgaacttcgcttcttgatttcttactaaccattttcacactctccttaattatttcttaccagtcttaccaactttgcgtctgataacttcatcagcatatttaatacctttacctttgtatggttccggtcttctcttatctctgatttcagctgcaaactggccaactttttctttgtcgataccttttactgtgattttgttctgaccttccagtacagtctcaacaccttccggatcgatcatttcaactggatgagagtatcctaagttcaatgtcagtttgtttccggatttggatgctctgtaaccaacaccattaacttccagaactttttcgtatccgtttgttacaccaacaaccatgttgttgatcagtgttcttgtaagaccgtgaagagatttcattttcttcagatcgcttggtcttgttacaacaacttcttcaccttcaactttgatttccatttcaactggaagctcttttacaagagttccttttggacctgttacagtcactacattgtttgctgcaacttccacagttactcctgctggaattgcaactggcagtcttccgatacgtgacatacctgtttcctccttaacttagattttcggaggagctgctttggctcctctgttttcagttacaattatctatgttttacacagaatatctcggtgttcagtgcctaccaaacgaagcagagtacttctccacctacgccaagttttctggcttctttatctgtgataacacctttgtttgtagaaaggattgctgttccgagtcctccgagtactctcgggatatcctctgttccagcatacacacgcagacctggtttggagattctcttcagaccagagataactttttcgttcttgtctgcaccatatttcagtgtaatatggattgtttcaaagtgtccatcttctacgatatcatattttgcgatgtatccttcattgaaaagaatctcagcgattgcttttttcattttggatgcaggtacatctactgtatcatgtttcgcagtatttgcattacggattcttgtaagcatatctgcaattggatcgctcatgttcatttatatgacctcctatatgtttatacgggtagtttcctttgttccggacttaccagcttgcttttcttacgcctgggatctgtcctttgtatgccagttcacggaagcaaacacggcagataccatattttctcaaatatgcatgtggacgtccacagattctgcaacggctgtattctcttgtagagaatttctgtttgcgctgctgtttgattttcattgatgttttagccatgaatttccctcctttactttgtgaatggcatattgaactgtgtcaataattcacgagcttcctcgtcagtcttagcagttgtaacgaaaattacatccatacctctgaccttatccactttgtcgtattcgatttctgggaaaatcagctgctctttaattccgagagcgtagttacctcttccgtcaaatgcgttcggatttacacctctgaagtcacgtacacgaggaagagcaaggttgatcagacgatcaacgaactcatacattctttctcctcttaaagtaactttacatccgatcggcataccttctctgattttgaagttagccactgagttcttagctcttgtaagaactgctttctgacctgcgattttctcaagatcagctactgctgactctaatactttcgcgttttcttttgcctcaccaacacccatgttgattacaactttgtccagtttcggcacttccataatgtttttatatccaaattttttgatcattgcatcaacgatctcattctgatactgttctttcagtctactcaaagttctggtcctcctttcccaaattaatcaattactttacctgttgattttgcaaaacgaacctttttgtctccatccattttgaatcctactcttgtagcttttccgtcatgcagaagcattacgttagaagcatcaatgtagccttcctgatgaacgataccaccattctgattcgctgcgcttggtttcgtatgctttgtgagcatgttgattccctcaaccagaacttttccgtctttgttatttacagcaagaactttgccttctttgtttttatctttaccagcgataactttaaccatatcgccttttttaatcttcatagctgacattctaggcacctcctacagtacttccggagctaaagaaacaatcttcatgaagcgtttgtctctgagctctctggctactggtccaaaaatacgtgttccacgtgggttcatatcgtcttttataattacagcagcattttcatcgaatctgatataggaaccatctttacgacgagtactgtttacagtacggacaactacagccttaacaacgtcaccttttttaacaacgccgcctggtgttgcatctttaacagacgcaacgataacatctccgatgtgggcatatcttcttgtagaaccgccaagcacacggatacaaagtaattctttagcacctgtgttgtctgctactttaagtctactttcctgttgtatcatgcaggtaatcctcctttattttccattctttgaacgaatcttcaaagtgcgaatcaattatttcgctttttctacgatctcaacaagtctccatcttttgtctttagacagtggtcttgtttccataactcttactgtatccccaacgttacactcattgttttcatcatgagctttcaatttataagttctttttacgattttcttataaagagggtgtttaacgtggtcttcaactgcgacaacgattgttttgtccattttatcgctgacaaccttgcctgtacgaacttttcttaaatttctttcttccacagtacgacctcctattcagctttagaagcttctgtgatcatcgtctgaattcttgcgatgttctttctaacttctttaattctgcttgtgttatctaactggttagttgcattctggaatctcagattgaagagttcctttttagcagctactaattcttcatttaattcttctacagattttgctcttaattcgtttacaaatgtattaattttcactgttatcaccgccttctaagtctgcgcgagaaacgattttgcatttgcaaggtaatttatgcattgcaagacgaagtgcctctctagctgtttcctctggtactcctgcaatttcgaacattacacgacctggttttactactgctgcccagtactctaatgttccttttccactacccattcgagtttctgctggttttgctgttacaggtttgtctgggaaaattttgatccaaactttaccaccacgtttgatgtaacgtgtcatagcaacacgggctgcctcgatctggttagaacgaatccagcacggctctgttgcgacaataccatactcaccatatgaaatcgtgttacctcttaaagctttacctttcatggtaccacggaactgtttacgacgtttcactctttttggcattaacattatttatcgctcccttccttatctgctctagtcggaagaacttcgcctttgtaaatccaaacctttacaccgacttttccgtaagttgtgtcagcttctgcgaatccataatcaatgtctgctctcagtgtctgaagcggaattgttccttcgctgtagaactctgtacgagccatatcagctccgccgagacgtccggaaacagatgtcttcacaccaagtgctcctgatttcattgttcttgacatgcaggatttcatagcacgtctgaatgaaatacggttttccagctgctgtgcgatgttttcagctactaactgagcatctttatctggtctttttacttctttgatgtctacgattaattttttgtttgtgaatttagcaagttctgctttcactttctcaatctcagaaccacccttaccgattactacaccaggttttgctgtgtagatgatgattttcacacggtcagatgctctttcgatctcgatcttggaaacacctgcactgtataatttctttttcagaaatgttctgatcttgttatcttctaccaggttatctgcaaagtctttttctgcgtaccatctagaatcccattctttgataacgccgactcttaaaccatgtggattaactttctgtcccatgagtgtcctccttatctttcattcagcacgattgtgatatggctcattctcttttcgattctgtaagctctaccctgtgctctcggtctgattctcttcattgttggtcctttgtttgcataacactcttcgatataaaggttctcaacgttcataccgttgttgttctcagcatttgcgattgctgatttcaataatttctctattacgcttgaagcatatcttggattataagctaaaataccaagtgctgtctgtacatccttacctctgatggcatccaaaacgtagcatgctttctgaacagagactctagcgtaagaaatcttagctgatggtcttgtgtctttctgctcgtttctttctctcttgatttgggatctatgtccttttgccatggatgaaccctccttccgaataatctaatctatattatctgacttttgacttcttctcgtcttttccgtgtcctctgtatgttcttgttgcaacgaactctccgagtttgtgtccaaccatatcttctgtcacatacaccggtacatgttttcttccgtcgtgaacagcgattgtgtgtccaacaaatgacgggaagattgtagaacgacgtgaccatgtcttaataactgatttatcacctgcagcgttcatagcatctacttttttcagtaagctggcatctgcaaatggtccttttttaagtgagcgagccataggttctaacctccttgtaaactaaattatttgattgctttaccgtctcttcttcttacgatcatcttgttagaagctttgtttttcttacgtgtcttaagaccaagtgccggtttaccccatggagtacatggacctggacgaccgataccagtcttaccttcaccaccaccgtgcggatggtcgttcgggttcataacagaaccgcggacagtaggtctgatacccatgtgacgcttacgtcctgctttaccaacgttgatcaggctgtgatctccgtttcctacgacaccgatagatgctctacaaatgattggaaccattctcatctcaccggatggaagtctaagtgttgcgtattttccttctttcgccatcaactgagcgctgtttcctgctgaacgaaccatctgtccgccttttccaggatataactcgatgttgtggatctgtgtaccaactgggatttcagaaagtggcaggcagtttcctactcttacctctgcttctgctccgttcataactgtcattccgtcttttaatccttctggtgcaaggatgtaagctttctctccgtctgcgtagcagatcagtgcgatgttagctgttctgttcggatcgtactcgattccgattacagttgccggaattccgtcttttcttctcttgaagtcgataattctatatttctttttagctccgcctccgcggtgtcttacagtgattttaccctggttgttacgaccagcttttctatttttagattccagtaaggatttctcaggagttgtttttgtgatctcagagaaatcagatcctgtcatctgtcttctggaaggtgtatatgggttgtatactttaattcccattactgtctctcctttcatttttcctaattatttgtttcacggatttgcaccgtttaatgtcaaatcttacagtccttcaaagatttcgatatctgcgctctcttctgttaactgtacaattgctttctttgtcttagctgtttttccgaatgtcattccacgtctttttgttttcccgtcaaggttcattgtgttgacgctttttacttttgttcctgcgaacattttttcaacagcttctttaatctgagattttgtagcatctgtgtgtacctggaaagtgtatttcttatcagccatcatttccatgctcttctcagtgattaccggtttaaggattacatcataatactgaatgtttgccattatgcgtacacctcctcgatatttgcaacagctgctttagaagcgatcactgtgttatatttcaggatatcaaatacattgattgtatttgttcttgctgtctttacgtttgcaatgtttcttgcagaaagttcagcgtttacatttccatcttccagtacaaccagcgctttgtttacgtttaagttgttcagcatgttctggaaattctttgttttgatttctccaaagttcatctcgtcgatcacgataaatttgttctcagctactcttgaagaaagtgcagatttcagagctgctcttttttcttttttgttgagtttcatggagtaatctcttggtgttggagcgaatacaactccaccgcctgtccactgtggagatcttgtagaaccctgtcttgcatgacctgtccctttctgtctccatggttttcttccacctccggaaacttcagaacgagttttcgctttctgtgttccctgacgtttgtttgcaagctggcttactactgccatgtgtacgaggtgttcatttacttcaacaccaaacactgcatcgcttaaatcgattgtaccaacttctttaccttcgatattataaacagatacgtttgccatctgtgtgttcctcctttctgtccgtcagactagttagcctttacagtttctttgattgtgataagagatttcttaggtcctggaacggaaccttttactaacagcaggttgttctctgcatctactcttactacttccaggttctgaactgtaatcttctttccacccatctgacctggcatctttttacctttgaatactttactcggatcggatgccgcaccgttagaaccagcgtgacgatggaacttagaaccgtgtgtcataggtcctctgctctgattgtgacgcttgattgctccctggaaacctttacctttggagattgctgttgcatctaccttatctcctgctgcgaagatatcagctttgatttcctgagccaatgtatattcttcagcattttcaaatctgaattcttttacatatctctttccggaaacacctgctttgtcaaagtgtcctttttctgcttttgtcacaccatttctgtgtgcaatctcttttttaccgctcttgtcttttgtgacaatcttttctttcttgtcaacaaatccgacctgaactgctttgtaaccgtcattctcaactgttttaacctgtgttactacacatggtccagcctgcaatacagttaccggaatcaggactcctgtctcttcattgaagatctgagtcattccgacttttgtagccaaaatagctttcttcattataattacctcctgtgatttacagcggaacgctttcgcgctcatcctaaattataggattgttactgtctcattttgctgcccgcattttgtggactttcttatttgtttttcattttgatatcgatgtaaacacctgctggcatttccagtctggaaagtgcatctacagttttctgtgtaggtgctgcgatatcaatcagtctcttatgagttctctgctcgaactgctctctggagtctttgtatttgtgaaccgctcttaagattgttacaacttccttcttagttggaagtggtaccggtccgcttacctgtgctccgttcttttttacagtttcgatgattttttttgcagatgcatcaaccaactggtgatcatatgctttcaatgtgattctcattacttgacttgccataaaaaaagtcgcctccttttcgtacttttcacttcagtacgacaagcggtgactgtacactctcccgtgtgtgtcgtgagaaactcacacgttgtttcatacctttacccattatcggtaagcagtaatcagttgtgattcgtacagtgacttgtcgccagtttcctaacttgacattcgctccacggaaaacccgctatgtgatttctcactaagcggcaacctcacgcttcaacgctatcatgccacagctctcttagtataacgaacttattctcatttttcaagtactttttttatttttttgtattttttttaatacaatacagccgctcacactcgatgttagacataggctctgaactgtcatgctcacatgtaaagaaaagaatctattataatatgaagaaactcttttgcaatcttttcctttttcccttctttaagacttgccatttttgaaatcccacagaatcggaacctttttcttattgtcgtatcgtttcggaagtagcacatgtaacaaaaatcgcacaattttttcggtagattttcacaatttcttgtcaaatagtaaaaatcaaaatttttttattctgatttcttgacactcttttttctgcgtgatatattaaaaccgacttgtgaatgagtcataagtcatcgaccatttaatttggttgctgttgcagttatactttcgccgactgtttcccccaagaacagtcttgcgacggtgaactccaatttatatatacatcctcattgtaggatattccccagatttgtatataataatacaaactgcaaagcaacgaggaaaacctctcaatgacataccaaaagcaaaaagcacggtttttaccgtgctttttgcttatcatttttgctcatacagttgaaaatttcttctatttatgagaagataaaacaatcatacagtacgaaaggaactctattattatgtggatagctgataattggaaagattacgaagtcatagactgctcaaaaggtgaaaaactggagcgatggggagattatatcctggttcgtcctgacccgcaggtcatctgggacactccaaagacagacaaaggatggaaatccagaaacggacactatcaccgaagtaaaaaaggcggcggcgaatgggaatttttcagtctcccggagcagtggcagattcattacggatctctcacctttaatttaaaaccatttaacttcaaacacaccgggctcttcccggaacaggcaaccaactgggactggttctctgaaaagatcaaaaaagccggaagaccggtcaaagtcttaaacctttttgcctacaccggaggagccacactggctgcggctgcggctggcgcacaggtcactcatgtggatgcgtccaagggaatggtcacatgggcaaaggaaaatgcgctctcctccggtctgaaggatgcaccgatccgttggcttgtcgatgactgcgtaaagttcgtagaacgtgagatccgcagaggcaacacttatgatgccatcatcatggatcctccttcttatggaagaggtcccaaaggtgagatctggaagatcgaagacatgatccactcgctcattcagttgtgtacgaagattctgtcaaaggatgctctgttcttccttgtgaattcttatacaacaggacttgctccttctgttctgacctatatgcttgcaactgagttaaaaccatggaacggaaaagtcgaatctcaggaaatcggtcttccggtcaaaaatactggtcttgtactgccttgcggtgcatccggaagatgggaaagctgtaattagaacaaataaaagcaaaaatctgcagaaagtgccgaataaaatttttcaaagcactctctgcagatttttatttcactttaattcttcccagaatttctccgatcggcgcggaaatacttaagtttgctctgactgcctttgccatctctgatttattgatcaccaccagatactttccgcgaaaataatcgataaatcctgctgccggatatacaaccagagaggtgcctccgatgatcagcatatctgcctgcgaaatcaccctgacagccttttcgattatcgttccgtccagcgcttcttcatatagaacaacatccggcttgatccgccctccgcatgaacacactggtactccttctgccgctttcacaaatcctgcatcatagaaccgtccgcatttttcacagtaattccgatgaatgcttccatgcagttcatacacaacctgactccccgcggcctgatgcagcccgtcaatattctgtgtgatgactgcttttatcttacctgcattctcaagttctgccagcttcaaatgtgcggcattgggctttgcatccaataccatcatcttctcccgatagaactcaaaaaacgctttcggatgcttttcataaaaactgtggcttactacttcctcaggtgaatatttataagactgatgataaattccatccgcgcttcgaaaatccggaatattactttcggtagatacccctgctcctccgaaaaatacaatattgctgctctcatcgatcatttcctgcagtctctctacttctgcttcatacatgtttcccacctctttgtcagtttctatttacagtttatcaatcttcaaataagtgtccctgctcaatatgcttctgaatgatctccttcatctgctcccagattatctctgaagtctccgggatccgctcatttcttttatacacctgacttctgtgtactccgtgctcttcccagcttttcccacctgaagcatcattcagcaaaagaggctggaaattatcgagaagatgggcatattttgcttccggagtcttataagcttcgaactcttcccacaacttgcggaattcttgtccctgatcttccggcagtaatccaaaaatacgatcagccgccttttcttcccgttctctcttggtcgccgcaccactttcatcatatgcatacgtatctcctgcatcaatctcaacaagatcatgaatcagaaccatgatcatcaccttcgtcagatccacctcttctttcatgtaatcctttaaaagtactgccataagcgccagatgccaggaatgttctgcgtcattctcttttctgtttgcatccgcaagatatgtctgcctgaaaatattctttactttatctacttctacaataaactgtatctgccgttttaatcgtgtatccaattcttctcttgatctttccatcgtatttattcctccagtaattctttcatatcactgcatccatatctgtccagaaaatcttccattccttctttgatctcatctcttgtgtaatgatacctgtgaaggacctcgtcctcaaaacaattcaaatacgcataaaatgccagcgccatctccagatactccatatctccaggtaccatttcttcatagagaagattttccgcttcattgatcttgccttcatcagccatcctgcataaacgtgtatacagatcatctcctacatggtatctgttcgttacatccagttcatacatgggtttcttcttgttgaatagcagtcttcccaatacatttgcaaattccttgatcatacgcataatatagtcttgttcaacattcatattttctgctcctttctgcgaatcagaagaattctcatttttttcattatactcttgccatcctctgtcagcaacccggaatctaatctgcccgacattttttcaaaaatatattgacttggagcacactccatgctttatagtattcttatatcaagagtacacaaatactcgaatttccaagaaggagggattctctttgacgatcaaagaagtcagtgaaaaatatcagatcacacaggacaccctgcgctactatgaacgcatcggtatgattccggcggttcctcgaacatccggtggtattcgtaattacaaagaagcggatctgggctggattgaactcgccctgtgtatgagaaatgcaggtcttccagtcgaatccatgatcgaatacgtgcatctgttccaggaaggagacgagacaatccccgcaagactccatctcttactggaacagaaagaacatctgatcgaacaacagaacaagatttcgcaaatgttaaaacgcctggaatacaagatcagtcggtatgaagaagcagtacagaccggaaaacttgtctgggatgaggataaagcggaggaatgcaggaaacgataagagcttgtattagataaaaattggcatacaaagatgatcatcaaataagaaaaaatcaacagcttacactttccttatttagatatgtaagctgttgacggttagtgcccaatgacattcctgtatctataattttttgtttactccacagaaatgataaaatgctccaagcattcctgcatcattttggtgctttgcgaatactattttagtacattcctcaatactggatataagatactttttgacagaattttgaattttacctcgcagaaactcttcctgggccatgatgccaccaccaagcacaacaatctctggattgatcacatagcaaatattagcaattccctttccaaggatttctgccatttgatcaatggcacgattacaaatcatatctccttttttggcttcctcgaagatatggtatccatcccacttatcttcagaatctcctttccactgggatacttttttacttaaaatgctggctgccccaagcgtctgaaaatcactgccatccatgtgcatatacccaacctcacatgcactgttactaaaaccatgaaataccttcccatctaacacgatacagccaccaatacccgtacctatggtcaacatcaaaaccaccctgcatcctttcgctgcacctgaactatattctgcaagccctgcacagtttacatcattttccacttcacatggtatatgaaatttatcctctaatgtctttttaaattccatccccgcatagtcaggaatcagtggtgctgaataaaaaatagaaccgctttttgtatctaccattcctgcagtagaaatgcagatacccgaaatctttcccttggtttgttcaatcagatgctccacaatccctataactttcttcagaattgcaggtccacccttccacgcttctgttctcaaagtttctttcaaaataatttccgcattttcacaaatgatgccatacttaattgccgtccccccaatgtcaatacttatatacttcttcatttcataccctcatttactttcttatttaatcccatctgcatcttaaatcaaactcttttcaacttaaaaagcaacacccggcttttaagctgagccgggcatcactactaacaagtatccctacatggaatcttgtctacgtattatcattatagaaatttcttcttcgcatcacagatcatctgtgcagcttcttttacaatctccatgtcctcatctaccaatgctggaagaggatctcttactgcaccaagttccagtccttcattaatctttagaattgctttaataactgcatacatatttccatgcgctgaacacattttgtaaattatctcattacaagcatactggatttttcttgcctctgtcatctttcctgcatttatacactcatccaactttaagtataattcaggcatagcaccataggttcccccaattgcaccctctgccccgataacacgtccgctcataaactgctcatcaggaccattaaagataatgtactcagctcctgcagcctgcttaaacatttggatatcctgtaccggcatagaggaattcttgacaccaatgacgttgggatttttcctcatctctgcaaataaattctgtgtaagtgcaacaccagcaagctgaggtatgttataaattacaaagtctgtgttcggtgccgctgcactaatggcattccaatactgtgcaatagcatattccggtaagtgaaaatagatgggaggaattgcagcgattgcatctacccccagcccttctgcatgtctggcaagctcctgactgtccttcgtgttattgcaggccacatgggcaataactgtaagtttaccttccgctactttcataacattctcaagtacaatcttacggtcttccacactctgataaatacattctccggaagaaccgtttacatagacaccttttacccctttttttacaaaatattttgtcagtccctgtacaccttctggactaatgtttccttctttgtcatagcaagcataaaatgccggaatcacacctttatatttctcaagatttctcatcgttttgctcctttgcttcataaaagccattcattttgttttctctcctagcgttccatttcctctacaaatgattttgtgattaactgtggtcttgtgataatcgaaccaactacaacgctgtacgcaccaagttcaatgacatgccttgccttttggggtgtattgatatttccttcagcaattaccttgtgtttgactcctgcaataatttctctcagaatttcaaaatcattcttctctattttatctcccttactctgctccgtataaccgactagagtggtcccaataaaatcaaagccaagatcatctgcatgaagggcttcttctatggtagaacagtccgccatccaaagctgattaggatatttttctttcacttcgtggaagaattcatccaaagtctgattgctcggacgtttggatatggttgcatccattgcaataatatccggtttcacttccatcaattcttctatttccttcattgttggagtaatataaactgcactgtcttcataatccctctttacaataccaatgattggaagatccacttttgaccgaatctctttaatatcttcttttgaattcgcacggattcctctcgctccgccttcctttgctgccagtgccattcttcccatgataaaagaagaatgtagtggttcattcggcaatgcctggcatgatacaatcaattttcccttcagatttgccactttctgatacatctcttttcctccttggatttaacttccgtatcattcatttcctctttatgaaaataagcggtcacggtatataccgcctattttctttaattatcaggaatattacatcttatggttgaactttcagttcatcaatattaaacctctcatatttcaatatatttttcagatgcaattcatttcttgaccaggaatcatatttttcatataaaagcccaatctcgccatccggaagctctgtcagacaggaataagagtagcccatttgaggggtatccacagaatagcaatatttccaatctacagaatacttatcttttccggaatttcctgtttcgctgatcaaaccaatccatatctttccattttttctgccattggtcgcatttggtgctgatagtaagatagcaggctttccatcaacaggctttgaataattaatcactgacaactgcgttccataccctgttgttgcaatttctgttagtggaactcgctcactccaggtttctcctccatctgtactcatcacttgtgcaatatatcctgatcctgtacgcagataagttttcaaggaaccatccggcatttctacgatctgtgcttctgcggttgccccacctgtattctggtctgcttctacgtatgtccagttatctccatggtcatcactatacataaatcccagttctgcagatgatttcgaatacaatggaacaatcaatcttccggcatgttctccatttgctatctgtttgcctacacctggtcccaatacgagaaattttgattcctctggcttaaaggtacttacaatctgtaaatcagaccaggtttctccctcatcatctgagtatttcattgccaaataagttgttgggaatactttaaaatctgcatctttataaaaaacattcatatttacgtccgtgtctgtctgtgtttccaacaactttgtaccttcaaaattgtaatcatactgtttacatagcatggcatttccatttttgtacagattatattcaccatcaacactatattcagttgctgaatttgtagtatcgttataaatggttccattttctcttacagagtaatcatacgttcctgccggcatcatatcagcaaaaagaaatacccgatgtgtttccttatcctctaaaagtaccggatctatgtaggaagcactcccttgtatctgcacattcttgcccaccgaatcccgtggccagtctatgttctttgctacataatcgtcaaacttcaatggcaatgtcggctgtccccacgtttttccaccatctgtacttttcgcaaatgctgtattgatcttactttttgcatcatgggtgccaccatatcttgcatctgctgctgcaatcactgtaccagaatccaacgccaaaagggatgggattcggaaatagttggattttgtagcatctcctgcataaaagatattctctgcatatatagtctttcctgtcacagcaataagttcatcatcagaaagtacatcctgatatacctgcattctctctatggaacctccaaatggataggcaacggttccctgacgcatggtaccgcccagcattacattgtctactcctgtaatatcactgataaacttaaatgcctcctgatccagcgttgctattaattcgccatttgcaaacagcttgtactgtttattttctttgtccgcttttaatgcaactgtgttggatactcttccccccttataactaccacgcacagcagccgggcaatccagcgtatatttaaactcgccatctgtatttctcaattccatgcctacgccgcctgcatttgtgatatataagtggaaatgtctatcctgatttccttttgtaccatttcccacactcaataacgattgaatcgcattttcactggttgttttataggagataacgatagttccctgttccaatgcttttactgttgctgccccaggttctttactcaaatcatatcctgtaccttccgagatttcgattccttccttttgcaaaactggtactgaagaagattctgtatcttgtttcttctctgctacagcctcaatcacatctgtctgggcctcttgggcatatacactcattggtgcaacacacatcactgcagttgctgctatagaaacaatttttttatacttattcatatcgttcttccctctccgataatctcactgagtttcacttttcgatcttcgaaccttgatttcgtgcaggcatctgctgtcgcaatcgcagctcttgcagcttctcctgtgagcaatggtctgaattcagcgtcaacttcctttccatggagaatgccatttaggtatttcatctcatttttcataatgctgtggagccacattggcggtttctttcctggctttccatacataatggcaccatccatctccgtaccatgatagattcttgtccgatcatcatcttcttcctgtgactcatgcacaaggaaatgttcctccctgccatctactttcagtgtaccgccacaatcacacatatcaatcttaattgcaccttttgttccttgaatcaggacgtaatgttctggccaatggaaagcagacccccattctaatactgcataccgattatcagaaaactgcatattcacaaacaacatgtcatcttcatctccaaaagcctctccctgatgtgcaacatttccacctgtcatggtaacttcttctggcattcctcccatcaaaaactgtacacaatccaattcatggatgtgatggtacagatgtccacctgatttttccctgatttttttccaggaaatagttggctgctgttcttcccatccatttcttgcagaatggcaatagagaacttttccaatcacaccatcattaatcagttttttcgcatagcgtaccccatggaagaaattcataacatgacctgccataaagattacaccgtgttcctgacaggttcttaccatttcgtcacaatcctgataggaaagtgcaatgggtttttcacaaaatacattcacgccatgttctgctgctttgatgaccggctctttatgtaagtaattaggtgtggcaacaataactgcttcaacatcttccctgctatatagagtatccagatccgtttccacatcacaatccaactcctctgctatggtctgaccgttttccggatcaaggactgccacaatcctagcaccctcctgttccttcataattcttccaagttctgcaccaaaatatcctgttcctacaattgcatatcctactgttttcattacttaatacctccaatttttttattttactgcaccatctgtcattccacctgcaattttattctgaataaacataaaaaatataacggatggaactactacgagagttgatgctgccatcatatctccccagttcaatatttcagctccctgcaaagattttaatgccacggaaaccgtcattttatctgtactgttaattaaaatcaatgaatataagaattcattccatgcattgataaatgtataaattgctgttgctacaatccccggcatgaccagaggaagaacaatctgtacaaacgtttgaaatttattggcaccatccactcttgctgcttcttcaattcccaatggcaccgttttgaaaaatcctaccagcatccagactgcgtaaggaacgctaaaggacaggtacacaataatcagaccgatccgggtattaactaatcccaacttcgccattaccatagaatagggaattgccaacagaatgggtggaaacatgtatgtagctacaagtacttttgacataatggaacccagttttggaaaaaaacgtacaatcccataagccgccatagaagaaatcacaattgcaatgcacgttgtgataatggctatgagcaaactgtttccaatatttttagcaaatcccaaatcctgaatcacatgggtaaagttatctaaggtaaaatgtttcggtaagaacctggtaggattggatgtcaattctcccgatgacttcaccgaacacaacagtacccacactaacgggaaaaacgcaatcaatgataagattatcaaatatagatggcagaaagcatttccgacttttccttttcgattcatcatcatttatcctccttttcccattttgcaataatcgtaaagtacactacacataccaacagcaaaaatgccagcaataacatggtgactgcagaggatcttcctaacagtttcgtattccaacccatgttgtaagcataaatcggcattgttgttgttgcatttgccggtccaccaccggtaagcaggtaaataatatcaaagttattgaatacccaaattgtacgaagaacaactaaaagtccaacaacaatcttaatatgcggtaccgtaatgaaccaaaactgctgaagcttagatgcaccgtcaatctgtgccgcttcatactgatcctgtggaattgtctgcaaagcagataatacattcaccatgatcatcggtgcaccaaaccatacattgataaaaattaacgtcaggaataccagactgctatcactaaggaactgtggcaattcgctgcatattccaagctgaaccagcatattgggaataaatccagacactccatttaaaatccatttccaggacaatgctattacaatggatggaaatgcccacggaataatcatcaatgtacgataaataccttttcctacttttacacggtttattgcaagagccgctgtaaatccaataaataactgccctaataatgagcctatagtccataaaacagaatttaggaatgccttataaaaatttggatctgtcaacacttccttataattcgccattcctataaaatcataggtcagccgaatcaagtgctttgatgtcatgctataatacaagctggaaaatatggggtatatcagcaaaacacctaccaccagcaacgcagggagtacaaaaatccaacgggcataatctactttttcttttcttttcatcatatatgcctttcctcatttcctgggctatctatctaacccgttttttcattgctgcacggtactgaataattcatttaattgcttttctgctgttttggcagccttcttcacatccgtaccattcgtaataatatcctggaacatactttcaatgattccctgagaagtaaggaaacctgcctgaatgcttggaccatgctcatatccgatagcggttcccttctccattgcatctgtaatcacatcgactgcgttggagaacttttgaactgtctcgttttccttatattccggcgtatcagaaattccactaatggaaggaagcattcctactggagtcgcatccaggaatttaatataggtatctctctcatacagttttttcataaaggctttacaaatttccggatgttttgaatttctccaaatgaccataggaatattagaagtctcagctccataatctggatcatccgcattcagctttggaagtggcgcacaatcgatctgatcgatcaaatccggagagttggtttccaccccgctaatctggaaacccgaattaaaatcaaatgctgtttttccctgataaaacaaatttgcctgatccaatacagcataattgacagaatctttcggagaacagtttttataaatatccaaccagtatttgattccatctattgccaggtcactggtcagatctgctttaaggtcatcggtcaaaagactccctcccccactcctgacataaaaattcaaaaacctggttgccataagatcatttgaaccacaagggaaggaacagccatacacaccatcttttgtaagtgtttttgcagcctcagcaaattcatcccatgtcttaggcacagaaagtcctgcttcctccaataaatccttacgataccacataacctgtgcgtgagaatacagtggcaaggaataacattccccatctttttcaccttccgataatgccgtctttgaaaatttgtcccttccaatatcatctattaagtcatccacaggcaccaaagcatctgcatccatcatctctaccacatgccctggaagtgcagtactcatgtctggcacatttcctgaagccagccccgttgtccattttgtgtaaaaatctccccaagagaatgtttcaattttaatatttactcccggattatctttcataaactggtccgcggtttcctgtatcacttccagtcttggtccttgtgtaaaagaatgccaaaatgtaatatctcctttcagctcctcggatgccacttgatttgctgcgccctcttctttagaaccacatcccgcaagtatggtagatgcaatcattgttccggctaataaaatagctgtttttttcttcataatctcaccctcatttgttcgttatgttgttatttagtttcattttcccaatgcagccacatcatttgttttattgtaatcttattttagtcactatttttatacatatctactaaacgcacactcaataatagcattttacactcattttttactctcttgctactttccgatattgattcggagtaaaaccaaaggctgacttaaattcccttataaaataattcgtgtcttcatatccacatgcatacgcaatatcattgatattgtcattacttaccagtaaagcccttgctgctgttgtaagccgaatctctctcacatattccattggtgtctttcccatattaatcttaaataggctgctgaatctctgtttactaagatctgccatttctgccatcttttgtggcgtgtacttttcacttggatgcagaataatataatctgccactatatagatccttggatcgatttgctcattcttctttgaattcctatcccttaatgacttttcctctattgtttccacgaaatctccagtcaccttatcaaccttattcccgtgcatagccagcgaaccaatcagaagatccaaattccctcttacaaagcatttttttaccatggaatccttttttacccacttataaatttctttaaagtaaacatcttctccctcattgaccgaaactcttggaatcccataatattccgccaacatgtcttccccttcataaaataccgaggtagtaaaacgaatactgtaaaactcaaaggattcactgagcgcacgacaagacattttgcatccctgcgggatatatacaatctgattttcctccacaataatttcttccccgtcaatacaaagttccgcctttcctttttcaatatatcggaatatactatacggaatcactgattccggatacacccatgttcttcccatggaataaaactcaatatataaaaacgtaaatcgtatgttatctaccactgacatatcatcctccattgattaaaaaacggctataatgacacaccaagatttctccctttctttgaatattcctttaaaacagattcaaagatcggaaaaacctaactatgtattatagctgctttcatcataatttctttaaactttaattttaacgactattttttttactatttccggtgatttatccatcattgcaaccttatgtgcatcgcttggaaagcacaccataaactctcctgccttcaaaagataaccgcctgattcatccccttgataaaacccgatatctttttcttcactgaacggcgtttggatttgcaaactacttacatcagcagttgcaattctttccactccttcaataatataatgaacatctatatacttttgatgtgcttcatacatacactccttttcttccttgctaacaaatgatactgggttcgccactatgactcctttctgaattacggtatccggaaatgcttcttcccatctttttatttctgccaaatagcataatgcctgatagattttcctgtcttccttatagttttccttattctgaatcgaatcaaatatcatctctggtatctcctttcaaattagaatctcatgtttttttaacgtattacgtaaaactgtggccatgatctggtatcctttggcatttgggtgcagaccatcataggtaatcttatccaacggcttgtctgttcctggaaataccattgtagcataataatttacaaaaataagattattcttcttcgccacttctgccagccactcattcagctctttgatataattttttctactcctttcatccatcaggatcggaatatgaattggtaaaagagatgttagaatcaagcagatattttcttcttttgcctgttgtacaatttctgtaatatgcagctttgcagttgccactacttgattatacggtgtcggctccaatcttttccaataatctccttccagctctatggaatcattaattcctattcccaggatacaatatcttggacgtaattgaactgcatctgtataaaatcgcttttttaagtactttgttgtatctcccgcaatgcccctattaacaagaaagtgattaccacttccaaaatatgcatttagctcccaatactctgtaatggaatccccaataaagagaaaatctggcttttggtttgtgtagcataatgcatgattttttatatcgaactcttttctttttttatccgctgcaacattttcagagaaatattccagcctcatgtatccttcatctgttgaaatcatctgttgcctccttttgatttactataaatatgcgtttgcaaaacaccacaaaccgcatagatacagccttttttgttacaaaataaaatatctcctcaaaactcatttgcaaagtaagattcctaccataaaatttgtatgtcctatcttcctgatgatttattgctcgctgacattacacaacttattaccgtaatagttgctaataaaattcatcaatataagtatccgtagcctgaaacctctgattgtctgacaacgtaggactctatctacatttccatcaggattgcaaacgtgtttctcaattacctatattataaaaaataagtgcatattccgaaactgaatatgcactcaaaaatagtattatacgcttattttatttcctttttcacataaagaaggtatgacattctctgaaactctacctgtgtgtttatatcttcattagagaattatttcattgtccatagctatgtaatcaataacctgacagattctaacacgctgatcctggttttaaaacagatgtttgaaaatgagtactattgtatcttccctgatgggaaaaaattgcacccactcatacggaaacgcgagaaccgtcattctcccacacaatactattcacttaaatttatatcttcttcactatatagcacttccccgttgctttcaatcactttctgataccggtaaaatgatttcttcttataccgttccatcgtacctgttccatcatcatttctgtctacataaatgtacccatatcgtttttttaattctgcagtagatgcactgacaacatcgatacatccccaggatgtgtatcccataatttccacaccatcctgaactgcttctcccacctgtatcaggtgatccttaagatactgaatccggtaatcatcctctactgttttatttccattctcatcttcgttcagaacatctacagctcccaatccattctctacaatgaacagcggcttctgatagcgatcataaaacatattcagcacatagcgcaatcctttcggatcgatctgccacccccagtcacttgctttgagtgttggattcggtactcctcccagaagatttccaagaccttttttctgtttttcaggatctgatgtcgcacagacactcatataataactgaaggatacaaagtctaccgtattttttagaatttcttcatcttccggagcaaactgaatctggattccatgctctctgaagtatcgtttcatatatcccggatattttcctcgtacatgcacatctccataaaaatagttacgatgctctgcatccatcgccgcgatcacatcatctggcatggatgcattgcaatctctgtttttccttctctgcatactgcacttacatatgctctgtgcccggatgccagatccactgccctgatactgcatccattcaactctctttttaacacaaccttcgtactatgcggaagatacaacagatatctgccatctgttgtctgcgccatacgaatctgtgttgtctcattctctaacacttcctgtgccggtatcaactctcctgtatgaagctcatcaagaagctgacggatcattccataatcccacgctcccggaaactgtagtgcttcattccatggaaacggtgcgtcaaatccttctccaaggattggatttgcgggtttgttcagtttttgccagttccagattccatgagctccataagtcacccctgcacaagccccggacaaaatgctgctccatgctgcttttctgacatcttctgcctgaaaacgaccatatatttttctgctgaaccccatctgctcataacatggttctgcattgatcaatggttttttcggatatttcttacggaaattttccggaaggacatatgccatatcctgcccttcccgattatgtccggactggaacatataaaaatccagtttttccaaaaattcttccggaagaaaatcatatccccgtttgatatgcatcgttttcaatgtatgcggacttttttcacataaaacatccagtgcatcccgataataggacactgcttccggcgtatcaaaatctgtatctccgcttacaatgtaaatcggctcaaatcgattaaaaacatgtacaatcttttctgtatatgttttaacaaattccttcggcattacattacagtccataaccttacttccccatgttcccggtacataatttaaccagagtaccaccagcgccaactgaaatccttcctcttttgcctgttcacacattctgaccgcatgctcataatacgcctcattcaactttgtaaaatcaaaccgatgtccatccgctgtcgcaaatggatataatccgatatccgaaatacagcgatcccactgcggcattgtattaatctggagaacgttaaacccttgctctttgcgtctcttcagatagtaaatccactcatccccggttatatttgtaaacgcactccagatagtatctgccagataaaagaacggctttttatcccgacaaaatgtgcttttatcctcacttactgttactctgttcatgacgctctccttttaattctatttggacacacagttcagcagaacttctcctctcttcacgcattcccctgctgccgtcttaatttgcatatagtctgctgtatttgcaacaatgaccggtgttgtaatatccaaaccttcctttttgattccttcaatatccgctctgaccagaagctgtcctgctttcacatgatcaccggctttcacttttacatcaaaacaacttccatttaaagtcaccatatccatacctacatggatcaaaatctctgctccgatatctgatttaatgcctgctgcgtgtccggttggatacatcacactgattactccgtcacacggtgcacagatttctccattttccggaattactgccgcaccctgtccgaggattcctcccgcaaacgcttcatctcttacctcagaaagaggaatcacttttccactgaccggcgccagaagcgcttcatcttttgccggaatcatttcctgtggttcttctttcttttcttcttttttcggaagcatatcatcactatatccaaagaaatacgttacaatcgcagatccaaaataggcgatcgcacacgcgattaaaaatccgacaaatccgacgccgatatatcccggcaatgtcaaaatacttgttccaagaagtgttggtgctcctgttcctgcagcagctacgatagctcctgcaattccggaaaataccgccccgatgaaaaatggtcttttaaaccgcaatgtaactccataaatcgcaggttctgtaattcctgcgagaactgccgaaagcgctgccggacctaccagttccttaactgatttgtcttttgttttcaggaacacaccaagtgtagctcctacctgtgccatgttattgggtccagtgatggtaaacaatgtatctcgtccatactctgcaatattattcataacgatcggaacaaatccccagtgtacaccaaaaataactgctgccgaccagatcagaccaagcagtccccctgcaataaccggattcaattccaccagtcctgtatatccagaagccagtgcttttcctacaatatctgcaatcggcccgattacaagataagttgccggcaccataattgccagactgagaagcggcgtcaaaaaggttttgcatactgtcggcacaattctcttcaatcctttttccagtttagaaagtgcatatactgaaatcacaatcgggatcacggatgaagtatagcttaccagcacaaccggaattttcaaaaaggtcaatgcctctccggcagaatatgcagctgtcagatccggatagagtaatgccgctgcaactcccactgccacgaactcattcgctctgaatttttttgctgcggtatatgccagaaataccagaaatcgtatccataaatgtattcaggagattctttttctcccctgactccactgcatcgctctgattctccttttttagatctgtaacttcaaaaattgtatcatatacatccgctacatgctgcccgattacaacctgaatctgaccaccactgtcaagtactgtaatcaccccctccaactgctccagttttttcttatctacattctgtgtgttttttactttaaatcgaagccttgttgcacaatggatcaaagtattaacattttccacaccaccgatatatctgacaatttccttttccagattttcatagtttttcttagccatggttgcattcctcctgttttttgtaaactgtaacgcgcgttttgttatctgagaacaaaataacatttgtcggaaaaactctcaatcccctttcgatttttctgctattttacagattttgtctttctttttctttgcttctttcccccaatttatgaaaaaataacaggtatttaaattttctttaaatacctgccaccaaaattttattcaatacatatattttgatttatcaaatacagtctgcccctcaaaaagcctggttctataatatactcgcatgatctcctcattttcatctttcatatactgcatcagatgcttcacggctgccagatgtctcttcgtgtgcgtttccttgatcaacgtcaattcaaatccaggaagctctaccggcgcaactgcatcaaacccgatcaatgagatatcctttggaatccgtacatttcgctctaacagagccttgatcacccccatggaaataacagagctttccaaaatcaatgcagtaaccccccgcatcccctcgtccaaatattttcccatagaaaatgcgacctcttccacattactgccaagatgccggatacgattgcttacatctccacactctcgttttgccatctccagaacgaatgcttctcttctttcgagaaaattgaaaatatcaatatcttctgccagatatacgatcctgctatgccccttatctactaggtaatccacacctcttcgtattccctcccgattgtcaatcagaaagctgttgattccctcttcgtaaaacagattatcccctgttacgatcggtatctgaagttctaaaaaaggataaatatctgattttcccatttctgccgccatgatgtagattccctttacatccttctccctgcattcagagatcagatttccaatctcctcaaactgctcttgaaacaatcggtattcaaatgtatctccttccctttttacagtctcccgaatcttttcgataatcggattctgttcctggctccgtttcataataatcccgtttttgatatagttgagcatcattacttttccatgaacaatctttttctgtatttcaaaattttcctgtaatttttcctgcttttctctgacacattccaggatccgctttttggtattttcattcacacccggacggtcattgagcgccagcgatactgttgcctctgaaagccccaattcctttgcaattcctttcgctttgattcgcatatatccctcgcattaatgaaaaatttccaacacctctcgtaattttcccacttcaatctgtcccggtgcggaagcctttcccgcggttccaaatgtcagtgctgaaccaaacacctctccacacattctgctgacaaccccgtcttttgccatagacatggtaatgatcggtcgatctgcatacctatgtgccatctcttctgtcgccgtaagcagtgtcagtacatccttcttacactgcggcataaccgcgatctttggaagatccgcaccaagttcctgcatcttacgaagtcgtttcacaatctcttccttagacggtgtcttttcaaaatcatgattggaaataacagctttcacttgatgatcgtgcgctgttttgatcaactttttcaccgtctcttctcctgaggacaactctacatcgatcagatccaccagttttgtacctgctgccctttcattcagttcctgatatgccaacagctctattgcctgttctccgccctcctgctgagtccgaaacgtaaacaacagtggaatttctcctaaaatttcacgcataccctgcagcatatattccacacattcccatcggaacacttctgtataccagtctgctctccattccaccacatccggatgttccacaatggcttcctttgcgctttccaaaatttcctgttttgttctacccactatcggaacacagatcttcggcatcccttttccgatctccagatttcttatctttaccgtattcatcacttttccctcctcaatcaaatggtttttaatatgtttcactacaatttttcgaaattctttttcccgatcacgtttgctagctgctcctttctactgcatactaagcttttgtgatgtattccttctttattatacgcttgcagcaagatcacagcaaccagaattgagtattttgcaccgcttttcgaaacacaacagtagtgctttttctgctttcatgttaaaataaaaaaagatatgaaaaaaggagatttcacacatggcagctacaattcgcgatgtcgcaaaaaaatccggtctttcactgggaactgtcagcaaatatatcaatggtcatcccgtaaaagaaaccaatcgactgttaattgaacaggcaatccaggaactgcaatacaaacctaataatatcgcaaaaggactgcgcaattcgcagactttctcagttgcagtattactgcccatgctgacttctaatttttgtacttctatgatttcatccattgaatcctatcttttgccaaaaggatatactgtaatcgtatgtgaatgccataatgatgcagcaatggagttgcaaaaagcgcgctttcttttagatcgcatggtagacggtattattttgattccttatgattccaccggaaaacagattgaattaatccagaataaccatactccattgatcgttgtcgaccagattatcaaagatcacccctcggatacgatcattctggacaatcaacgcgcttcctatgaacccgtaaaaaaattaatctctcttggtcacacaaaaatcgcaattattaccggaggaattgatcattatacctctcaacagagactaaatggatatgagaaggcattacgcgagtgccaccttccaatttataaacattatattcaatgcggaaattactcaacagaaggcggatacgaagcaatgatgaagcttgcgaagcttccagatccccccaccgctgtttttatcagcaactacgatatggaaattggcgcttacattgccatcaataatttgaacctgaaaataccagaagacatttcactcattggatttgacaatcttcctcttgtaaatatcgtaaatcctccactttccttttctgaacagccaaccgatgaaatgggacttgccgcggctaaattgctctaccgacgtatgcagggtgatcaatctgattaccccaagacactgatccatgccccaatctttcattacacagacagcatttgttcccctctggataaagaaagagttcgcctctgaaaagcgaactctttctttatcctttgattactttctcctcattttcctgtaaatgaatcttccatttctgaccgcagcatctgacttctatctcctgtgaaacgcacgacttcagcactgccaacacaagctgatgatccttccactcaatactgacttctacaccaccttccgcaagcagtccctccatacgccctgacttccaggcatccggcaatgcaggaagaagttcgatcattccataacaacttcgtaaaagcatacttgctatcccgctggctgctccaaaatttccgtcaatctgaaacacttccctttctcctttgctttctcccaatggcgggtgcaaatcaaacaaattgtcataggacgattttttcaaaaggttggccaaaaaaaacaaagcgctgtttccatctcccaagcgtgcacacaaattgatcagccacgcacaactccatccaatatgaccccctccatattgaagccttctttcaataaaccgcctgactccctctaccaattctggtgtatcatatggattgatggttgtccccggatgaaatcccactactcctgaaaaatggcgatgccccggatcctgttccggaaagtctttctcccattcctgaatttgtccatattgaccaatctgatattctggaagttttatccatacttttctgacttcttccactatatcgtcttgaatctccagcacttctgctgcaaggctaagattttggaagagctcttttatcagtgccaaatccatagtcgatcccgcacttactgcacactccctgcctgcttcgtccaagaaagtattttctggtgaagtagaaagcggtgttctgtatttttcatcttcgccttcttctaaccagtccagacaaaaccgggctgcaccagacataaccggataaattctgtttttcagcagattccgattccccgtatacttataataatcaaaaatctgtgcactcagccatactcctcccatcggccagtatgcatatttcgccagacctgcaaccggttctgtctgacgccaaatgtcaacattgtgatttgccacccatcctctgcaatgaaaataattctttgctgtttcttttcctgcttcactcatttcttccaacatgcacaaaagtggctcaaaacactcagaaagattacaaataccagctggccaataattcatctctgtattaatattgatcgtccaattactgctccacactggtcgggtgctctcactccaaattccctgcaaattagccggctgacttcccggtcgggaactggagatcaatagatatcggttaaaatggtaatataagcaatatagtcccaaatctgtttcaccacgtttgatcctctttagcctttgatttaagggtatctcttcccgcccctctgtttctaactgaaatctggacctttcaaacagtgcctgataatcctttctgtgtgtacttctgatttgctgatatgtcctgcttttcacacgattcatatactgttcacaggaagcaaaacaatgttctatagaaggatccatatcataactgccttttcgatatccatcggctgctgtaattaaaattcgtatttctctggcatcgcgaacttgtattttcccgtccacacaagaaacatctccgtccactgtgtccacatgcatttgacagcaaaacggcattcccagttcctgatgcatgtacacaattggattctcactctctacataattgggatctacatgacttggtgcatttccagaaatcatctggctgttttcccgctgtattgttgagattgtctgcaatttactttccagccaaaaatcaatcttcatttttgtttctgataccagatgcactaccatcgcatgatctggatttgatacaaacacctccgactgatattgccggcctgcgcacgtaaactctgttcgcacaacagcttcttctaaatccaattctcttctgtaattttctacattctctattccataataatggtatcgaaaacttccaagaggcatataagactcattatattgccctagcatcttcctttcgatcagattctgtgcctcaaaataatgttcttgtgcgcattgtttttttacatcttccaatacatgtttggcaattttctgctccattcttcttccggttcctgaccataatgtatccagattcaatgacatacattcttctggcactccaccatacacaactgccccaagactcccatttccaactggcaatgcatcacaaaaagaggatgcaggggcttcataccataatgttgtattcatttcttttctcgctttctctctattctttgactgctcctgatgtcactccatttacaatatatttctgtgcaaatacaaaaattaaaattgtcggtatcgaaatcaataccaacgccgcattgtatcgtccaaggctctgcgcgctcattccataagcgcctttaaaggcatttactgcaactgtcgttgtgcatgcctgatcccttgtaagaaacatcagcgggaataaaaaatcctgaaatgaccacattaactgcaatactaccagattgatcacagctggttttgccaaaggcaaataaattttaaaataggtctgtacaatattcgctccatccacatttgccgattccatcaattcccccggcaagccatcaaaaaagttcttcatcataaggactccaaacgggatcgtaatcagacattctgataaaataaccgctaagtgtgtgttatacaaatgcgctgtcttatatatgtaaaacaacggaataatcaaaattggacctgatattgcaagacacatgactaccatgctataaatccattttcttcctgtaaactcaattttagaaaaggcaaagcctgcaaaggaacaaatcagcaccagcagcagcgacgcacctactgcattgattgcagaattcataaaataccggtaaaaagggactccgttgatcttattggtcaagacatatacatagttctgaattccatttacttttaacgaatctttcaccagagaataaataggaatcatccagatcagtgtcatcaaaactaaaaatacgaccattcctctcctgcttccttttgagatcgaaaacagatctttatcctgcattttttcctgtttctttttcatcgttgattcctcctatccattcttttctgtaagtctcagctgaataaaggaaatcaaaaatgccacgatcagaacgacaattgccgctgcgcataccaacccaatattcgaacctgctgatctcgttgcacgataaatataagttcctataatttccgtttttcctcccggacccccatccgtcatcaggaacactctttccatctcacggaatcccccgagaagcatggataagataattgttttatgtgtattttttaacatcggataaatcaccagaaacaactgatgccgtgtctttgctccgtccatggttgcagcctctaatacactgtcactgatcgttgtcagatctgcagtataatacataatcggaattccaatcaaaaaaacagagacagaacacaccgaaaaaatagcaagtctgggatccgccagccatctctgtgccagtacatccaatccaacgcctcgcaacagctgattgataattccattcttatattccagcatggagctaaatactgctgccatcaaggcaatcggaagcatggacggaataaagaacaatgcatgaaaaaaacgcttgcctttcatcttgaaatttaaaacgattgcaatgaaaaatccaaatgtcaatccacaaaaaatattcgccgctgataaaataaaggtattcagcaaagaacgccaaaatttcaaatctgtcaaaaccgtcttataattagcaagtccggtaaactctgtatgcctgaaggtaatcgtaacgtcacgaaaactgtttacgctcaaaaaataaaaactatatccaagcagcccgataaatatcactatcaagggcaggagaaataaaaatcccgccctgttatttcttttctggctcttcttgtttaatttgtttaattctgccattttcctgccctctaatcatgatttctaatattttccgctggtccactctttctgacaagttttcaatgcctcgtctaccgtcttcgtaccattgatataactttgcacttctgccccttcgatatctgaatatccggaaacattatttctgtccgctgttccgttgttgattaactctacaacggtatcccacccttgctttgctgtatctgaggcaaacaggctttcatctactgaaaattctttttttgccgaagtccctgtcagctgttttccaaaaatatctgcaccttctccaagtgtcaaatatgccacaaattttgcagctgcttcttttttctctgaatagtctacaattccaattccagaatcaatataagatctgacagatgctgttccatccttctccacaatcggcaatgccatcgcaccaacatcttcaagttcaattccattcttttctctcaactgttttgaaagaagtggagattcccacgatcccatataatacacaagcgcatttccattggtaaactcttccgttgcacttgcataatctaaatctaatgtatcttttgtaaaaataccttcatcaaagaattttttaaatccttcaaatgccattttatattctttactgtctacatctgctccgtcatatctccactgattatagtaatctccctgctgtcccaatacagtaagcatcatttcatccatcacccacgcgtcttttcctgcaaatacccctgcatatttatccggatatttttcttttaacttttctgccgccactttatattcttcgattgtttttggaacatcgcatcccaactcttttaaaagtgccgcattataatatccaatcatggagcctgaatttgtcagcacaagcatttttgtatccccacttgtcaaatgatttccctgctccagacatttttctgaatacagttctttccaatcctctcctgcagcctctggcattaattcatccaaattagccagataatcctgtacttcttctgcaaatgccgatggctgaaccccaattacatcaatatcctcttctgtgcttaaagctaacggcactttttcctgaaatgccttgctctccatcacagtcatgttaattttaatatcgggattttctttttcaaacgctttcaccgtctcttcgatctgatctgtgcttggaaaccatgtccaataatttaaagtcacctgttccccttctttactgtcagactcctttgatgtaccacatccactcaacagtcctacggtcataatcgctgccaatacaacactcattacttttttctttttcatgctatttctcctcttttctttctaaaaatgaaccggttcatttttgttgtaaaatatatagagtcttacaactcttattttacaacagcatcattaagttggcttaaatatagcatatgattttttcactgtcaatttattttatattctttgtataaatcatagatttttttcttatttttttgtgcatattttctattccaaaatagaaaaaagacagattatcttgattgagcatctgtcttcactctcacactcctattttctttctgcgtctttattttctcaactcttttaactgtctcatcagaagagggatttcaaaaagaagcatcacgatccacccgatcagattcgcccacgcaaggcttacaaatccaaagtggaataccagaaacatcacaatgactgccagcacacgtcctgccatattcataaaagtactgtacagtgtcaccttcagatctcccatgccacggaaaaatccctgaatcccattcgttatcgccggaagaatatacatccaggaaaccagatgcagataagacctccccagagccaccacctgtgcatcttcctgagaggtaaacaatcccataatcttctctgcaccaaaatacatcagaaccagcaaaatcagaccatataccagttcaatcccgattccactctgaaatcccctgcggattctttcctttttgcctgcccccttattctgggcaataaaagtcgtcatggcatgtccgatgttctgctgaggaatatacgcaaaatcatccacgcggtttactgccgtaaatgctgccattacactgactccctgggtgttgaccactgtctgaatgattgtctttccaatctgaaggcagacttgctacatggcactggtgcttccataactaatagtctttttcatcaatcttttatcaaacacaaaccactgctttcccaggcacaaaagcggaacccgcttcctgatatacaacgcacaaaaaagacagctgctggcctcacttaataccgttgaaatggcacttcccgccacgccccatccaaatactgccacaaaaagcagatctccgagcacatttaaaattgcactggcaaccagaaaatacagcggcgttttactatcgcccagtgcccgaagtgtattggcaagaaaattgtaaataaacgtaaacaaaattccgataaaaatgatcctgagatacacaagcgcatccggcatcacttccttcggtacctgtatcagccgaagcaatggttctgacaacaagatcgtcagcacggaaaacccgattgaaaatccgcagccggacaacaatgtggtactgatctgacgagataactgttcataatttcccgctccaaactgggaactcattaaaatacttgcccccatacaaagaccgctgatcaaaaggatgacaagattcatcaccggtgtggatgttccgactgctgccaatgcgctctcccccacgtatcgacctacaatgatggaatccactgcattataaaaaagttgaaaaaaattaccgagtaccagtggtatcgtaaagccaatcagaggaacggccactgctccttgtgtcatatcatgttctgttccgtttttcatgctgttccctcctttttctacattttaccacacaaagtcaagaaccggatttctgcataatatggcggataacaacatcttttacaacagaaaactgcagctatgaaaaaagttcgcacaaaacagacagtttgtacgagctaaacacgatatcattgcgtccgtttccatacacaagagtaggttctacataagaaattttgtgtttgctggaacaaagcatctgaacaacataagatttactgtccgtaaattctttcggccccattactccgccaatatatcctacccctttcacagacttttggtctgctatctctaacatgactttagccggtaaaagattatatttttcgagttgttctttatcttttgtataaacaccaacgcaatcaaagttagcaaggggctatcggttaattcccgacagccccaaatatgtattttctattgttcttctttgcccgttgccctctcttctcccatttctcggatcatctctgcaataacatcttcctcttcttcaagttcctctgaaatctcagaaatagattttccttttaccagtttcttttgaatctgcattctaagaagctcaattttcccttcgaattttccctcttcccaggacgcttcccgctcctgccgcatatgcttttcctcatcatattcataaatactcacttgtttcgcctccgctctgttttgtttcaaaaactctgccatgatcccttcccgaatacactcactgattgcctgttccactgcttcttccaccggctttacctgggcgtactcccgcactcttgcagtatattccgagtaatccttcagagatttgcacatttccttcaacttttcattatgcccgcggttgatgttcagcatcaccgcagtcaattccaatgccggatgttcttctttgacgcaatacgcatcagacaatcttaaaatttttcgatccggctgttcctgacttccattgtaaaaaatcacaaactgcgggggcggaatctgaatgcatttcgtaccatacaggttttcatcttttgtcatcccggaatacagatccgagatataaaacaaataccgcaggggcaggttgggactgtaggtggactgatgctcgtacagggaaagtctggaatcaataagaaaagacaaatcattatgcatcgacatgtaaatcgcattttctaatgtattgatttccagcaattccggatcttcgtaatgccttccgccggccgcattgtacagatcgagcagatctttcctgtcactgtagagcatggcaaaaatcctcgatttgtacagtctgtttacgggctgcatctgtgttgtctggttcatataaatacctccttgaatgaaaatagctgcaggaggctttccaatacggcatctttctctcaaacctctctgctgttttagattgaaatcaaagcatagagattttccgatatgctataagaataaaagatgcggtatggttccgcttagaaaaccagaatttttatgcttttctgcattataacatgattatttaaaaagagaaagttgaaattcgtttttcacctcaaaaactccatcatttcttattacgtaaaaagagaggaagattcctccccctctcaaatatggattttctatttatcttctgatcatcattgcttcataaggtctgagcaccccagtctctcctttttccttataattccagatcagtacctctccgtctttccattcactcaaaagatcgcacgctgccggtgtttcactgaaatttgcacataccaggacttctgtatcgccttcttttcttatataggcaaacacctgcggatcctcttccatcaaaagtgtaaactctccgtttacaaacacggaatgttcttttctcagccggatcagcttctgataatagtagaatacagaatcgggatcggatagttccgactcggcattgatcttcgtataattcggattcacttccaaccatggggttccctttgtaaatcctgcattcacctcaccactccactgcatcggcgttcttgcattgtccctgccctttgcataaatggagtgcatgatttcttccttgctgtatccttcatccagacgctctttgtacatattcagtgtctcaatatcctgatagtggctgatatctgcaaagcgcacatttgtcataccaagttcttctccctgatagatataaggagttccctgcattccatgcagcaaggtagcaagcatctttgcagattccacgcggtatttctgatcatttccccaacgggacacgattcttggcagatcgtgattgttccagaacagactgttccatccacatccgtgcagttctctctgccattttgcaagcacctgttttaatttcactactggaagcggcgccacatcccatttcgactttccttcctgctgatccagaccaatatgctcgaactggaacaccatagaaaactcgcttccatccggattgctgtacaatttggcgcgttcaatatctgcgccccatgcctctcctactgtgatcagatctcccttttggaatgtttccctgctcagttcctgaataaactcatggagtctcggtccgttgtttgtgatcttttgatccggctccttggcgatctgatcgatcacatccagacggaatccgcccgctcctttttccatccaccagaggatcatgtcatagatctcacggcgcacttttggattctcccagttcagatccggctgttttaccgaaaactggtgaaaatagtactgttccagttccggcacccattcccaggcagatcccccaaatacggatctcatatcattcggatacacgccctctttcccatctctccagacataatagtcatggtacgggttatccttgcttttctttgcctcctgaaaccagcgatgctcatcagaagaatggtttaacacaagatccatgataatccggatatttctctttttggcttcttttatcagctcttccatgtcatccagacttccgaacataggatcgatatcctgataatcagagatgtcatatccattgtcatcctgcggggatttgcagaccggagacagccagatcgcatcgattcccagctcttttaaataatccagtctctgaatgatccctcgcagatctccgatcccatctccattgctgtcctgaaaactgcgtggataaatctgatagatcaccgcatccctccaccagtgttcttttcttgtcccttccattgatgttctcctttatttctttcttctgatcaaagttccgtttttcttcaatacaccctgctcaaatctgcgggaaaacaaaacttctccctcttcttttactgataccgattcctcagaacagtttaagagtacttccagctgattgccgtcctgatccagtttgatatactccacaagacgtctcttctcatactcattcggaaaatggaaatacagacttttgcaggctgcttcctgtttccgcattgcgatcagcttttgcatgatctggattttttcctggttttcggatgaatccagttcctgccacggcatacatctgcggcagtccggatcaaaaccgccttccattgcaatctctgttccataataaatacaggcacttcccggcattgtaaacaacacggcaagttgctggtaaaacagatccagatcatcaaaccgactcatcagacgctgcgtgtcatgagaatccagaagattgaacatcacattgttgctctgctgcatatacatcgtataacagcggttcaccatatactcaaattcttctttttccattccccgatctaagaagaaatcatggattccgctcatcagaggatagttcattacagaatcgtactcatctcccagaagccactgacttgcatcatgccagatttcacccagtaagtacagatccggtttcatctgttttaaatgctcccggatttttttcagaaaacgatgggaaacttcatttcccacgtcaaaccggattccgtcaatatcgaatttgcggatccagtcttcgcatattttacagaagtattgaattacttcttcgttatttgtattcagctttggcattccatcagtaaatgcaaatgaataaaaccgtccatctctcgtatctgcccgtttttcgactgtttcccagtcatggatcataaaccagtctgcatacgcagatttttcttttttctccagaacatccagccatggtgcaaactttcttccacaatgattgaacacggcgtccaccatgatccgaatcccatgctgatgcgcctcttctaccagatctttaaattcttcctccgttccaaaatgaggatcgatcaccgtataatctgtggtgtcatatttgtggttggattctgctttcataatgggattcaggtagattcccgtgattccgagcccttccagataaggaattttttcccggattccatttaaatttccgccaaacctttcttcatttgtcacagtaccagtgcgccacttcgtcacaccggcctcttccttcgtatctgctcccctgcagaaccggtccggaaaaatctgataccatactgtctcgttgacccagtctggcgtcacattaatatccgcaggattcatccacggtacggtaaagcactgctgcatccttccatccatctgcatctgttcttctgtcagaaatccatcctcaaaataataccagacttcttcctctgtatgtaattcaaaataatatttgcagcgtttatactttggaaccaatgtcgttgtccaccagagctggtgacgcaaacgtttcttaaaacagatttcctctctctttccggtccatttctcgtttccgccaaggattcccgattcaaacggatctccataatgaatgaagacccgtctgacatcatatcctgttcttaagtttacgatcagctcattttcatttaacgcataactcatctgttctgatgttttatgaaaaattccagcaaattgcatgttgtctctcctttagttccggaatgtgatcagatttttatatcgtttcagttctttcccggcaagtgtaaagtccggcattctccactcccagttcggagaaccgactgtccccggtgtattcagatgcccttcttttccctgccctaaaatatccgccatcggaataatcgcatattctgccttgctctttaatgtataagcaagcagacggtctttgacacttccctgtctgattccctcacgtgtgagaaatctgcgcactttacgcttcgccgcgcaggtcagattatgataccactccatcaaagtatcattgtcatgcgttcctgtatacacgatcatattttctacatcgcggaagctgtcatatgcatattttccttttgtctcaatcgaaaatacaaggatcttcatgcctttcagatgatagtgatccttcaattccagtacttccggtctgagatctcccagatcttccgccaccagatttacacccgggatcttctctttgagcgtgtcgatcacttcatatcccggcgcctcaatccactcaccttccacagctgtcggacaacttgccggaattttccagaaggtgtcaaacgcccggaagtgatcgatccggataatgtcaaacagcttgctgctgtatccgatccggtccacccagaactgatagttgttttcttttaaatattcccagttgtagattggattgccccatctctgaccggtagcactgaaataatccggcggaactcctgcaataaagatcggccttccgtctgtatccagaaggaaattgtcttttgatgcccacacgtccacagaatctacccccacataaaacggcacatctcccatgatctgaatatcatacgcattggccttttctttcagtttcatccactgactgaaaaatacatactgtaaaaacatatgatactgcacttctgtttctaactcaggcgccaaatccgttctcgcatccggccacattttatcttcctgtttccattcattccagcagcatcccccgtttgcctttttcagtgcacggaaagcaccatattcatatacccagctctgagctgcaaactcctgatagtcttttgtctcacaaccgccacttgtaagaaatgcctgaaaagcttctcttaaataaggctctttgtgcagacgcacagcatcgtaatcgactttcgtcgcatattcgtgaaacccttctggtctttcttttaacagcccttcctcatacagcgtatccagactgatatatagctcatcccctgcacaggaagaatatggctgatacggggagtttccgtatcccaccggattcatcggcaaaatctgccagatcttcacaccgctttcttttaacaatgtcagaaaatgatatgcttctgcccccatctctcccactcccgttcgggacgggagggaagatacaggcatcaaaattcctgtttttctcattttactctctccttttgcttttgccatatcctacagatgccagatgtctctgttatactctgcaatcgttctgtcggaagagaaaaatccggctttggcaatgttcaccagcatttttttctcccacgctttttcatcttcgtaatcagaaagcatctgctcttttgttctgatataatctttcacatccaaaagtgccatgaaccagtctttgcctacgatttctttgtacagacgtcccaggttcaccggatctccgatgcggatcaaatctttactgataataaagtctaccagctcttctaccagcggatcattctcatagatgtctttggaacaatattctcctgtctcatacagcttgatgatcttttctgatgtttctccgaagatataaatattgtcatcccctaccaactggtggatctctacgtttgctccgtcttctgttccaagtgtcacggcgccgttgagcatgaatttcatatttcctgttccggaggcttccttggatgccagcgaaatctgctcggaaatatcacatgcagggatcagcttctctgcttttgtcacattgtagttttctaccatcacgatcttcatatatgggcttacctgcggatcattgtcaatgagctgctgcaggcagaggatcagatgaatgatatctttggcaatcgtatatgccggagctgcctttgctccgaagatcattgtgagcggacgtttcggcagatttccttttttgatctctttgtatttgtagatcgcatacagtgcgttcatctgctgtctcttatactcatggagacgtttgatctggatatcaaatacagaattttcatcaatctccacattctgtgtcatcttgagatatttctttaactctgcttttgcttcttttttaatctctttcaattttgcaagaacattctcatcatcctgatatgccagaagtttttccagttcttctgcattctccatatatccaggtccgatcagttcttttaagtactctgccagattgtgattgcagtgtaccagccatctgcggaatgtgattccgttggtcttattgttgaacttctgcggataaatatcgtagaacggtttcagctcagattcttttaaaatctctgtgtgaagcgctgccacaccgtttactgcatatccgaaatggatatcgatatgtgccatatgcacacggtccatctcatcgatgatatacactcttggatcgtggaaatctcttctgacccgtctgtccaattcccggatgatcggcatcagatgaggcgctactttttccaggtaagagatcggccatttttccagcgcctctgccaggattgtatgattggtataggcacaggtcttgctcaccacatccactgcagtgtcgatattgaatcctttctgctcagtgaggatccggatcagttccgggatcaccatcgtcggatgggtatcgttgatctggatacacacatgctcatgcaagtgatacagattcactccacgctcctcggcttctttgaggatcaactgtgctgcattgctgaccataaagtactgctgataaatacgcagaagctgtcctgcctcatcactgtcatccggatagaggaacaatgtcaggtttttgtggatatcctgtttgtcaaactggatcccgtttccaatgatgctctcatctgcactgtccagatcaaacaggtgcagtttgttgcagccgctctgatatcccggtacgtcaatatcatacatggtagatttcagagtaaaatctttaaacggaacctcaaaactcacatctgtttttgtcagccagctcttttctgtgatccatggatttttctcttcccactgtttgttgtcagaaaatttctgaaggaataatccgtcgtgatagttcagtcccacaccgtctccattaagtccgagtgttgcgatggaatccaggaaacatgctgccagacgtcccagtcctccgtttccaagagatggttccaattctacttcttcaatctctgtcagatcgtgtccgtgttttttcagcacttctctgacttcttcaaatacacccagattgatcaggttgttggacaagagtttccccaccagaaattctgcggaaatgtagtacagttttctgtctccctcgttgtgtttcataccattcattttttctttggaccactgaagaagcgctgcgtaaatctcttcactggatgcctcttttattcctttgctgcaaactgtctgtaacatctgctctaattctttttccattatcattctcctttcagattccatgttctatttcttctttttttcaatctgttcatatacacggagcaattctccgacactccatgcctgtgcaaaacagcctttggaagacactgggtttttcccgtcgtagatttccggcagctgtccaatgcacccttccttaagtgcgcactccagaacttccagctgctcttttacgtcctgttttgcgcgttcactgtatgcgtgaaccttgagatacgccagatagtaagcccccagtgggaacgtccatacagtgccctgatggtatgccatatcccgcttttccatcgctccttcatagtatggatgaaattccggatctgcttcttccagtgtacgcatcccataaaaagtatacagcttttcaaaaacagtttccactatcttccgctctttttccggctccagcatcgtaaacggcatggagagtgcccagatctgattgcagcggatctgggtatctgcctctgttccggaaaccaggtctttcagacaatttttctgcgacatccagaatttttctgtaaacgaatcccttaccttttctgccagttgcgcgtagtatctgcttgtttctgcttcttctgtaaatgtttccataatttttaaggcattgtaccagtaggcattgatctccaccggctttccgtgtcttggagtcggcagaatctctcccacacgtacgtccatccaggtcacctgagcaagaccttcccctgcacagatcagcccgtctgtatccatgtggatcccaaactttgtcccgttctgatatccatccatgatccgctccatcaccggatacacttcccggacaaactccatatcttttgttgcttcataatacaaatacacgcaattgataaacaacagtgccgcatcgactgtattgtacagcggctcgtttcctccctccggaaacagattcggcatcagaccgtctctctcattctgtgcaaaggtgcgcagaatcctttttgcagtctcaaactgtccggtagaaatgcagattcccggaagtgcaatcatcgtatctctgccccagtcttcaaaaaacggataccctgccagtattgtatctccccccgtggattcccgttttgaaacaaactgtctggcactttttgaaagcattttcccagcctccgaagtaaatccggctgtttcctcgaactgttttctgtctgctttcgtctgctcaatgatcgtctgtgcactgttttttgatggttccatctcatagactacttccagaaccacctgttttcccgcctctgcctgcagacggatctgatggttggctcttgcgtgtccatacgccctgcgtccgtcacagacatcatagcggtaaaaataaacttcctctgtctctgctatctcttttatcattccgtttgtacgaagatgcagtgtcattccctcactttccactgcttctcctgtaaatacgatttcctgccccggcaagagatcggctccctttggtacgaactggaaaaatggagtcagcacaaattccacattccggctgctgcggtttttgatctcataacaaagcgccaccgtatttttttcctgcggcattccgatttcctttttaatctccacaccatttacaaggaatctccagattggagtatcttcataggaaaatgccgccagatgaagatatccatcctccggtgtctgctcctcaaactcctgtgtagacagtgtaagcacatctccttcttctatcagaagttcttcttttaagcggtgtatcatgttgtatctgcagtttggcgctgttgtacaagccatcaacagtgcatgatcatttcttgacactgcaccagtcatcgtcatggaggaaaatccccccagtccgttggtcatcagataacagttttccagtccccgctctctcgttttccagtcttgttttccatacatccatttcatcacactttacctgctctcttccctttttccaagtatcaaaatactgaccggagaaactttcatacgtttcgctgcaatctgcggatgtttccataaaaagctgtcctctccgtctgcaagaacttcccatgtcccttctgaaagtttcacttccttctgtttttcactgccgttatatacaatacagagtgttttccacaactgcacaaactcttctcttcatgttccctcacctttcatttttgtttcgtattatttcgtacatgatgatgatatcattttttccctgtttcgtcaatcctaacaacgtatagtactctttattttctatgttttgcatagtttttatcctgtatttttattcactttcaacaatccatgtttttttgcaaacaagaaactttccgaaactcattctctttttccatggatattcattgcattttccactttttttctatataatgaaaaaggttactatgaacagtaacaaaaaaaggacgcagaaaggagccccaatggctacattacaggatattgctgatcgtctgaatatctcaaaaggcactgtttccaaagccttaaacggtgcacctgatatcagcgaaactttacaaaaaaccgtactggaaacagctgttgaaatgggatatacaaaaatccgccgccagaaggctgcggagaaaaaactctgtattctgattgaaaacgtagattacaaagagtcacatcaatttggatatgaaatcctgctcggcttccgccagcttgcagaacctgccggttataccgtagatattgtagatactactgaaaaactgcagaaaagcaccccgtacgatgtttttatgctgcagaaccagtatctgggagcttttgtcgttggattttcgttgaatgatccgtggatgaaagattttcagaccagcagaacaccgaccgttctgtatgacaactatattattgcaaatccaaatatggcatatgtcggaatcgacaacaacgaaggcatggaactcgccgtctcccatttaaaaaaactgggacataaaaaaatcggatatttgagcagcgcccttggttctcatatcatgcagatccgccacaaagcatttttccacgctttgaaacaaaacggcctaaagtccgatccgacctatgcgggaagttcctactatatcactcaatgtatggaaaagcatctgccccgtctgttggatctgggaatcacctctattgtctgcagccatgatctgatcgccaatgccgcgatgattcagtgtcagcagctcggatacaaagttccggacgagatcagcatcatcgggtttgatgatctcccgatctgcgcatatacttccccgccgctgactaccatccgccaggaacggatccagcttggcaaaagtgcttactatgctctggacagtctgatgaatcaagtatccatcggaacacttctgttacatgcaaaattaattgagaggggatcgaccggagaggtccctcagacaaataataatataaaaagaactggcgattgatttcagcttcaaccgccagttctttttacaaatcatattcttttaacagagtctcccgatatgcctcatcctccactgcccgtttcatatcgtccattcgctgctctttgagtaatttctcataaagagtattgattctccgttccccttctttatatcctgtctcatacatatcctcttcatatgcttcctgattaaatgatgacaataccatactgatcacctctgctttatgctttctcaaaatatccacaagcactccctgttcgatacagatatctactgcccgcaaagttgcttcttctggatcttcatacatttttttctgctcacgtacaatgaaaacaaactgcgagtactctctcagacgcctgcacttctccattagctcctgattatgtccataattgatgttcagcatcaccacctgacactccagacagggttctatgtcttttcccgtcttctgaaatgcatcacttagttttaaaagactgcgatccggcgctttttttgtcccattgtaaaacacaaaatactgaggaaacggtaacttttttaatccactgctatataaattgatctgtccgtcttctatatatccttcgtacaaatgtgccagatagatcaacccccgaatcggaaggttgggattgtatgtactctgatgctcatacaggttcaaggttcctcctactaaaaatgaaatatcattttttatggaaatataaactgcatcctccagtgtattgacttccagttcttccggatcactataagatgttccattcagtgcattgtacaaatccagcaaatctttcttttcgctgaatataagccgaaacaggctgtctttgtattccctgtttaaagttggatactttgagaaattttttgtcttcttttcttccatgtactttcctccattataatcattttttttctgcagtgcaatatcactatctgacgtttccataaaataactgaatatttcggctgatctgccgttttttgattctttgatttgtttagactttttcctaagattactaaagataaaaccattcagagacagtttttaatatgcttattgtatccttttccctttccgtttacaatcccgcaattttcacaaaaacagcaaaaaaatacgcagaccatcgtatcgcccacgcatttttcatttcttataattcaatccgtcctgttgtatctttattgattacgtaatatgctgcggattcttctggcttcagataaagttttacatctttcagctcgcctactttatgcttcagctcttttgtccagacttcttttacttttttcatcagctctttttctgaatattcttttccggcaaactgcagatacatttcacattttactgctgtttttgctgctgtcgttgtctttgcagaagtttttcttgctcttgtctttttttcttctgctgccagctcagattcctgtaacacagctgctcttgtttcaattgcttttgttgtgtctttcttggtctcgattgcctttgcctttcctgcttttgtctcaatcgcctctacttttgcaggttttacttcttcttttttctctgtcgccttttcatttgcaacaactttctttgctgtctgtgctgatgtcacttcttctgctgtctttaccggtgtctgtactgttgttttcgctgttgtcttagatgctcctttttttgctgccatatcaattccctcctgataaaacacgaaacggatattgctccgcttatcttccggctctgccgcaaaccacacggccggaacatgactgttatcccctacttttcgcaggttcagcaaatattgtacctcatttttccaaaaacgtcaaaaaaatatcagagctccgttttcttttcctgttcccgttcctgataacctctgaaaaaatcggataatttatccagtgtctgcagcaaaattgcaagctcctgctcctttagattttcaatcaccgcattggtcatctgcatatggaaattcttatgatgctcatatgctttcttcccttttccggtcaactggatatagaccaccctgcggtctgtctcgctcctctgccgtgtcacatattttttattgaccaggctgttcatagacgttgtcaaggaacccgctgtaattcccagtgttctcgcaactgccgacattgtgctttcctctcccagaccgattgcttctattatatgcatgtcgttgttggtaatatccttaaattcctctgttatgattgctttttcttccaattcccagatttcgttgaacaggtgaaccagggtatcattaatggtcttatatgcatccaaagatgtattctcctctccgtaccattcacttgttcctgtcctttacgtaaacaatgatgccaccacttcctctacggtctcgatcttttctgccttccatgcgttggcgccgcaaaagataagtccgttttctatatctcctttcaccgcggcgatcaggctgtctgtaatgcagtatggtatctgagaagggttacattttgcaagacatctgtgacaggaactgtgttctattttctctccaagcataacacgtttcatgaggggattcaagatggctcttcccggcattccgaccggacttttcacaatgtcgatctcatcttttacagctttcagatacgcttctttataccgccggtgggcatcacattcttttgttgtaacaaatctggttgccacctgaaccccatccgctccaagctgctccatcctttggacatcacttctgtcataaattccgcctgctgcgatcactggaatccggcacttgtacttcttcgcatactgccgcaccacgtccagaatattcccgaactccatatggtaggcatctcccttccacttgtccagttccgcctctgtaaatccaagatgacctcctgcaagaggcccttctgccacgatcagatccgccgtccttccatattttttatcccagtatttcaagattacctgcgcagaacgtgctgtggatacaatgggagcaattttcaccgcactgccttctgtcagtgccggaaggtccacaggcagccctgcaccggatatgattaggtctgcacctgcttttactgctgcctttacatgatctgcatatccttttaaagctgtcatgatattatatcctataattccgttttctgaaatttgacgtgctttttgcatttcttttccaatcgcacgaagattcgcctcctccggatgtttatcaaaatccggttcccgatatccgatctgagcagtggatatcactccgattccgccggctttcgccacacttcccgccagccttcccagactgattcctacacccattcccccctggatcaaaggaacttttgttattttttctccgatttttaagttttccatattttacttctttctatggtatttttatgttgttacatcttccggaaacgctcgtaacgctgcactgccagctcctcaggtgagaaattgcagtgcgtgtccagaaactctgtgatctttttttgaagaacaaaaaccacagactgcatggtttcttctgtatacacttctggttccgcaatgacagcttcaatcacgccaagtttcttcaggtctgctgctgtcaatttcatcaccgctgccgcttcacttgcgcgtttactgtctttccacaagatactcgcaaacccttccggagacagcacagaatatatcgcattttccagcatccagacttcatccgcgactgccagtgccaatgcacctccgcttccgccttctccaatcacaacagacagaatcggaaccttcatggatgacattgcaaacaggtttcttgcaatggcttctccctgcccccgctcttctgcctctataccacaaaatgcccccggtgtatccacaaacagaagaatcggccgtttaaatttctcggcctgcttcatcagacgaagtgcttttcgatatccttccggagacggcattccaaaatgatgcgctacattttctttggtagattttccctttacctgtgcgatcactgtaactggaatccccgcaaacctcgcgattccaccaatgattgcaggatcatctccataacagcggtctccatgaaactccagaaaatcggaaaaaagtgtacggatataatcctgtcctacaggccggtcattttttctggaaattgtgacccgttcccacgcatctttttcctgtacagactgccgttctttttccactgtctgtacaggcttttgaataacaggattttgagcggtatgatgcatctgcagaatatttccaagaaccgttctcatctcttttcgctctacgatacgatcgataaagccgtgttccagtaaaaattcagaacgctgaaagcctttcggcagtttttctccaatggtctgttcaatgactctcggacctgcaaatccaatcagcgccttcggctctgccaggattacatctcccagcattgcaaagctggcagtcaccccgcctgtggtcggatctgtcagcaccgaaacatagagaagtcccgcatcactgtgccgttttaatgccgctgccgttttcgccatctgcatcagagatacaattccctcctgcattctggcaccgccggaacaggcaaatataatcaccgggagctgttcctttgtggcgcgttccaccgctcttgtgatcttttctcccacaacctgtcccatgctcgccatcagaaaccgcccgtcacacaccgcgatcaccgcaggattgccctcgatagatgcttttccggtcacaacagcttctgaaagtccggtcttttccttcagactttttaccttttcctcatatcccttaaactccagcggattgacaaattccatgtctttctcccactcttcaaaggaatcttcatccacagtcatccggattctttcatatgcgtgcacccggaagtacccctgacatttcggacagatatagcctgcactttttacctcttccgtcagaatcgcagcgccgcatttattgcacttcttcagaagtccttccggaacttccggccgttcgcttttcagcggaatataactttttcgatttttcttaaacatattctgcagtttcatacacttgcttcctttttactgattttccattgtttcaataaattcaatatcggtatttccacttacaaaatcgggatgatgtaaaatgtcatactgataatccacattggtctgaattccctcaatgatcacttcacccaatgcacttcgcattttcagaattgcttcttctctgcttttggcatgcacgatcagctttgccagcatggaatcgtaatacggcggcactgtatatccactgtagatcgccgtatcaatccgcaccccttttccgcccggcagatagacatctgtgatagttcccggagaagggcggaaattctttgccggatcctcagcattgattctgcattcaatagcatgaccgtttaaggaaatgtcttcctgcgaaacttttagcttctctccatctgcgatccgaatctgctccttaatcagatcaattcccgtcacccactctgtgaccggatgctctacctgaatccgggtattcatttccataaaataaaaggatccgcttttctccagcagaaactcaatcgttcccgcattggtataccctgctgcctttgccgcccgcacagccgcctctcccattgctttacgcagcttcggatttaacgccgaagatggagattcctcgatcagcttctgatgattcctctggatcgaacagtcccgctctcccagatgcactacatttccatgcttgtctgccagaatctgaaattcaatatgacgcggatgctcgataaaatgttcaatatacatggcatcatcaccaaaggcattttttgcctcactctgagccgtcagaaatgctgactcaaattctgcctctgaatatgcggtacgcattcctttcccaccgcctccaagtgctgctttgatcatcacaggatatcccacttccccggcaattcgtttcccgtgatctgcttcgtatatacattcactgcatccgggaataaccggtacattggctgcttccatagtctgcctggcaatcgatttatttcccagtttttgaatcacagaagaagacggtccgataaagatgattccacatttttcacaaagctctgcaaatctgctgttttctgacagaaatccaaatcccggatggatcgcatctgcaccggatgtcagcgtggcacttaatatattttccatactcagatagctttgtgcagacggcgccggaccgatacacactgcctcatccgccagctgtgtatgcagtgcttctttgtctgcctctgaataaacagccacagtcagaatgcccatctcccggcatgcccgaatgatccggactgcaatctcacctctgtttgcaatcaatattttttctatcatctctactcacctaccataaatgtcagctgtgcactggctaccacgtttccattcacagatgccactgcttccccgactcctaccggcccttttcgtttgatgatctttgtctccagcttcagtttgtctcccggaaataccattcctttaaatctgcagttctgcacacctccgaaaaatgcgatcttcccctgattttccggaacacttaagatcgcgactgcaccgacctgtgccagagcctctaaaataagaactcccggcatcactgctttctttggaaagtgtccccggaagaattcttcccggtaagtcacacacttatatcccaccgcaaattctccgggttcaaaatcttcaatcgcatccacaagtaaaaacggatgtctgtgaggaatgatttcctgtatctgttcaatgttcaatgctttcatattctgcacctgcctatctcacgataaaaagcggctgtccgtattctaccggcgctccgttttctaccagtatttcttctatcgttccgtcaaactcactttcaatctcattcatcagcttcattgcttccacgattgccagaatctttcctttctgtacctgctctcccacctgtacaaacggatctgcatcctctgccggtgatgcatagaaggttcccaccagcggggatttgatcacatttcccgattttttctccgaagaatcctgtggctgctctgatgctctggccggcacagactcactttgctctgcaagtctgacttcccctttttctttttttaaagaaatcttaaagtctccctcttcatatttgaattccccgagattcgaggatgaaactgtctggatcagttctaccaactgctcaaatttcatattatctacactacccttcatattttttcagcaacagtgacgcattgtgtcctccaaacccgagagaattcgtcagcgcatatgtgatctctttttcaaccggtgcgccgattgcataatccagactgcactcttcctctgtctctttggttcccatggtctggtggatgaatccatcctggatacttttcacgcatgtaacaaattccaccccgccggctgctcccagaagatgtccgataatcgatttcgtagaattgacaacaacctgatctgccgctgctcccagtgcataccggattgctcttgtctcatacagatcattgtgatgggtactcgttccatgtgcattgatgtaatcgatctgctccggctgtgcgcctgcctcttccatcgcaagcttcatcgccatcccggctccctctccgttttctgccggagacgtaatatggtacgcatctcccgttgccccgtatccgacaacttctgcataaattctggctccccgctttttcgcatgctccagttcttccagcattacgatccctgctccctcccctaacacaaatccatttctgtctttgtcaaaaggaatggaggctttctctggatcctcagaatccgaaagcgcggtcagcgccgtaaatcctgccacgccgcttgggcagatacagctttctgcacctcctgccacgcagagatccagatctccatatgcaatcgcacgaaatccgtctccgatacagtgggtccctgatgcgcatgctgtcacaacactggtacattttcctttgaatcccagctgaatggaaacatttcctgctgccatattggaaatcatcagcggaaccatcagaggattcactctggatggccctttctgcagaattttttcgtaatttgtctccacagcctgaaggcttccgattcctgaaccaacgatcacccccgcccgatacgggttctcctggctcatatcaattttcgcatcttcaaaggcttcctttgccgcggctactgcatactgagcgaacggctccattcgcttcgctgctttgaaatccatccgctcttttgccgaaaatcctttcacctctgccgccagttttaccttgtattccgaagtatcaaactttgtgatgggaccgattcccacctttccttcacgcacactgctccagaactcctccactgtgtttcccacaggtgtcactgctccaagcccggtcactaccactcttcttttcatactgttctccttttctacattgccataccgccatccacattcaatacctgtccggtgatatatcctgctttgtctgatgcaagaaaccagaccgcttctgccacatcttccggatttccaaaactccccagcggaatctgactttttgcatgattctgcacctgttcagaaagaacttctgtcatttctgttttgataaatcctggagccactgcattgactgtaattcctctggatgcgagttctcttgccgcagatttggtcagcccaatcacacctgctttggacgcactgtagtttgcctgccctgcatttcccagaataccggataccgaagaaatattgatgatccgccctgacttctgacgaagcatctgcctggatgcaaaccggattccgttaaaggttccctttaaattcgtctgaagtaccgcatcataatcggattccgtcattttcatgagcagtccgtctcgcgtgatccctgcattgttaaccagaatatccagtcttccataagtttctatcacatctttaaaaaatgcttcacaggcagaaaaatcagaaacatcacatccatagattcctgcatttcccccttgttctttaattgtttgctgcacctgttttgcctgttcttcattgccacggtaattgatgacaacaaaaacgccctcttctgccagtttttctgcaattgctcttcctattccacgggaagctcctgttacgaccgccactttctgttctaacataattcttttcctgctttctcaatatcttcccatgtggaaacctgatataccttcacatcacggttgatcttccgtaaaaatccggataacgtacgtcctggtccaatctctacaaaggtatccacaccctgtctaatcatctcttccacactctgctgccagcgaaccggtgctgcgatctgctgtataagcaattcttttgtttcctcgatatccgaaacataccgcccggtcacattcgtcacatacgggatctgaagtggtgaacattcaatctgatccagtacctcttttaactgtcctgccgcttcctgtaacatcggagaatgaaatggaccactgacgtttaacggaagtacccgttttgctcctgcatcctttaaaactgcccctgcctgctctacactttctttccatccggtgatcacaatctgccccgggcagttatagtttgcaatactcactccttcaattccagcgatcgcggcttcaatcttttcggcatccaggccaagtaccgcagccatcgcgccttttccatccggaacggcgttctgcatcaaaatgcctctctttcgaactgccaggatcgcatcctcgatctgcatccctcctgccgaagcaatggcacaatattctcccagactcaaccctgctgttacatccggcttcacaccggatgtacgcagcacctgctccattgccatacagaccgtaacaagtgctgcctgggtatattccgtctgatgaagattttccttttcctcaaaacacaaggatttcatatccagcttcagaagcccggatgatcggtcaatgatatttctcgcaatctcgctgtgttcgtaaaaatcttttcccattccggctgtctgcgctccctgtccgggaaacataaatgctattttactcatgcttggaaactccttttaacaatttttctgcctgctcggtgagattctgtatgatctcctcacaggaaagtatctcttttaccattgccgcagactggcctgccatcacacttccatttgtcacatctccgtccacaaccgcttttctaagcccccccagcgtcaaaagctccagttcttcaaacggaacccccgcctgttctttttccaggtatatttttgtcatctgattgcgaagcgcacgaaccggatgcccagtgcttcgtccggtgactctggaatcaatatctctggcttttataatacagtttttatagttttcgtgaacctgtgcttctctggatgccacaaacctggtaccaatctgtaccccttctgctcccagcatgaatgccgcagccatcccccgtccgtctgcaattccaccggccgcaatgaccggtacattcaccgcatcgactacctgaggtaccagcaccatggtcgtattctcgccgatatgcccgcctgcttctgtgccttctgccaccagtgcatctgctccgcaccgctccatccgcttcgcaagggcaacagacgcaaccaccggaatcactttgattccagcctctttccagagactcatatatttttccggcgaacccgctcccgttgtcacaaccggaactttttcttctgccaccagctctgccacttctttcgcataagggctcatcagcataatattgacgccaaacggcttgtcggttcttcttttcacttcctgaatctgagcgcgcacccactcggcaggcgcactggctgctccgatgatcccaagccctccggcattcgaaactgccgctgccagatgactctccgcaacccaggccatacctccctgtacaacaggagattcaatccccaaaagtgtggtaatctttgtcttcatgccagtatccttccttctatttgtgtgcttccagatattttacaacgtctcctactgtctggatctgctccagatcttccgacggaatctctacctcaaatgcttcttcaaacgccatcaccatttcaaacagatccagagaatctgctcccagatcttctttaaaggatgtctcctctgtaattgttcctgcgtctgctcctaatgattctgctgtaatttctttgattttttctaacataattttcttcctttcttttaccattccaacagacttcccgcccaggaaagtcctgctccaaatcctgcaagtatcagtttgtctcctttttgcaaccgcccttttcgattccattcatccaaaagaatgggaatgcttgccgcagaggtatttccatattcctgcaagttcataggaaatctcgaaatatccactccggtccgctttgccgcagcctcaataatccttctgttcgcctgatgtaaaaagaaatacgaaatttcttctttttggatcctggctttttcaagcagctcttccacaatttccggcaccctcctgacggcaaatttaaatacgctttgtccgtccatctgaatatacgctgcctttgcttcatccggatgatcccagttttttctgtgccggctgcatcctgtcaggacatctccttttgcgccgtccgaatgagcagcctgtacaaacagacctcccttcgattcgcgaagcaccacagctccggccccgtccccgaacaaaatgcaggtacttctgtcactccagtccaccatatgtgacatactgtccacaccaatcaccagcactgtcctgtaaattcctgcctgaatgtacgcctgtgcagtctgaagcgcaaacaaaaatccactgcacgccgcattcagatcaaatcccgccgcatgctctgcatgaatctctctttgtacctcacatgccgtgcatggaaaaacgttctcgggtgtggaggttgccaccaggatcagatccacatcctccgccgggatgtctgactgtgcaagtgctcttttcgccgcctctgccgccatatacgaagtcgtctcattctctgcaagatgtcttcttgcaattcccgtccgctcgcgaatccaggcgtcattcgtatccaccagatttgccagctcgtcattttctacaattctggccggcacataggagccggttccgcatattcttcctgtcatctttcttctccattatttttgtttcaaaatatttttgctttaaaatactttgatagtcaaactatatcacaaaaaataaatttgtcaatcctgttttttcatttttaacagtaaccaataaactgtcactctccccttttcaaattgaaaacaattgtaatatttccacgcataccgtataatagcccttggtattttctgcgcattgcaagcaactcttgcttgctaaaaaacggcaattcatttacattgattacaaattcaagcgaaacaagaagagcaaaaatgaatctaatttctattgccattggcggaatcttcctttgctttggaattgcctgtatttttctaaaagctgtgtcagtagaatatattgatacacaggggattttacatgaaaactttttcttactgcctgttggatttttatgtttattctgcggttttatcacatttcttacaatcggcataagaaatatcttctgcagaataaaaaagaaatttcgttcttagatacaggaaggctgtgactccaaacaagtcacagccttattacgttaaaatctttcttcctaatccgatccatacacttccagttcataaattctgactgcattatcggatctctgagtcggttttcaatggttgctccatcttgcacacaaaatttttttgccctataataaatgtaaacattttcaggaaggggatttgtatgaattcgatacaaaaagaaaatccgctgggttatgaaaaaccgccaaggctgctgaaatcttttgcaattccaagcattatcgcaatgcttgtcagttctttgtataacatcgtagaccaggtatttatcggccagggagtcggctatctcggtaatgcagctactaatgttgcgtttcctctgaccaccatctctcttgccatcgcacttctgatcggcatcggaagtgcttcactgttttccctgaatctgggagccggcaaaaaagaggacgccgcgcaggtcgtagggactgcatttacaatgatgcttgtctttggtgtgatctacgccgtactgatcgagatttttctcgttccgctgctcaccgcattcggtgcaacagccgaaatcatgccatatgccaaagaatacacccggatcaccgcaatcggtatgccgtttctgattgtcaacaatgggatgagcaacctcgcccgggcagacggaagtccgaaattttccatgacctgtatgctgatcggtgcgatcatcaacaccatactggatccggtctttatttttatctttaaactgggagttgcaggtgctgcgtgggcaacgatcatcggacagattgtatcctgtctggttgccgtcagctatttaaagcgattccgaaatgtggaactaaaagcgcattatttccggcttcacagaaagctttgtttaaaaatcgcttccctcggcatgagcaacagtttaaatcaggtagcgctcacatttgtacagatcgtactgaataattcactgacctattatggagcactttctccttacggaaaagaaatcccgctggcagcttgtggaattgttatgaaaacaaatgcgatcctgctggcagtcatcatcgggttctctcagggctcccagccaatcatcgggttcaactacggtgcaaaacagtatgatcgtgtccgcggcgtttataaactggcaattcagtgtaatctggtcatatctctgattggatttcttttgttccagctgtgtccacgccagattatctccctgttcggaacgggagatgctctttattttgagtttgccgtcaaatttatgcggattttcctgtttatggtcctcttaaacggcgtacagttattatcatccaatttctttgccgcaatcggaaaaccagtcaaaggaatgctgctctccctcacccgtcaggttttcttcctgataccgctgcttttcattcttccgctgtttttgggaatcgacggaattatgtatgcgggaccggtagctgatgccattgcgttccttacttctgtgttcttgatttcacgcgaaatgaagaagatgaaactggcagaaatagctaaataatatgaataattcaaaaaaataaaaaaatttagatttttttgaatttaggggtttacaaatcgattccactatggtattatacattttgtcaggcggacagccgacaagaaacgcggaagtggcggaatggcagacgcgctagattcaggttctagtgggagttaatcctgtgagagttcaagtctcttcttccgcactggatgaaagacattcgagagatcgaatgtcttttttgtaatttacagatttactatttttcaatctttccacttcatctcacattgtaccttctattattttatgatattctaaaaaagaacatatgatattaatttttctcaatatgaatagatgtgaataatcatgaatacacgcaatttttattgcggaatctgggtctgtgcctgatcctgattttttgccaaaaaccactccctgcttttttcgttatagcaggaaatatcatcagcgtcgtgatcggacaattcctcggtgatttaatccagacagagaatatcaaaaaaatcacagatactatgaatccacaacagatctatgaactgcacaatcatcccggagtatctctgtggctgcttgtcatcgtactttttcttatactcggtttgattactgacttatttttcaataaatttcataaaaagagggtatcacgcgatcatcaaatttgatgatcgtgtggtaccctagctctctatgtgcttctctattctatcacaaactcatagacaatatccttttgtgcactgatgcgatacggatcttccacatcactgccccaactgtcaataccacctactccacgtactgatccgcagatgcagactacggttctccgcggcaatggaagttcttcctgatgcgttgcattttccagctcttctgccgtatatgggagacaggaaaatccaaacttttcgccgcatgcacaaaacgtaaggccgaatgtttcttctgacgtatccgaattattcagcgtatcctttcgatataccgtaacacattctgtctccatatgcatcccgcattcctggggaaccagatatggcgtgaccggaagaccttccacttcatatcttccataaattcctcccgccattctgtccggatatgtttctcctgacagaccttcatagcaatatccgactgcctttgtcggcataataaaccgcattccaaataccggcagttccggcagtccttcttttccatgataatgaaccaaaacatgtattttcccatctgcatggactgtatagcttacatccactgtagtcgcaggaactgtgatggtttcataagtatatgtgagcaccgcctcctgtacatattcctgattgctgtacacattattttccggagcattgtgattttctaccgcttctccatctacagaaagctggaaaccgatacactttcgaaactgatctgcccccagccacattcctgatctcaaagggaatccgtttcctctgtcattatctgtagtcgctctccagaatgtgggatacggagttcgatacagccattcttttcctgcttttacaagggattccattccccctgtctgttttgagaaaatataatgaaaatcctccccatgaattccaaccgtcacatctccgaagacgattctaagtttatttctggagtccataataatatttcacctcctgcattgccggtttttctgttcgatctgcaaatacgattccgtttcccgaaaattcataatccgacggacggtcatcaaaatctcccccatatcgaagtacttcacgaccggtaatctcatcttttaccaaaagtgcctgatctatataatcccaaatgaaaccaccctgatatttttcatactgatccagcagatcgatatacgatttcatacccccaagtgagtttcccatatcatgcatatattcacacaggataaacggttttttcggctcattttccagatattcccgaacacgtcccggcggtgcatacatctggctctctacatcggaaatattgtcttcatagtctctgttttgaaatactccttcataatgaacgagacgccccgggtctctctttttataatacgcattcatttctttgagtacctctcctgcataggattcatttccaagagaccagaataacacagatgtatgatttttaaacatttcaaaattcgattttacccgatccaaaacaacatcctgccaaagctccacacttcccggtacattccaggacggctcaaccgatcccatcttctgccaggatccgtgactttccagatttacctctgccatcacataaattccagcttcatcgcagcgataataccaggttgtacgatccggataatgacaggtacgaaccgcattgatattgttgcgtttcatacattcaatatcataaatctcatcgttctctgaaatacatcttccactttttgcattccactcatgtcggttcacaccgtttatgatcagccgtcttccatttagttttatttttccatcctcaatgcaaatcattcgaaatcccacctgataaggaattatctctatgagatctccctgtccgtcaaagattcggatttccacctgatacagcttcggatcatcacaattccagagttgtacaggttcgctgatcgtaagatctgctctgaaactttctgatacggaaacttcttcttttgcaatcatctgatgaccatccaacagacatatctctgctctggcatccgcataggatgcggtctttccctttgttgttttcagttctatttccatcgacgcctgtctgccgtccagtgcacactttggacgaatccacagatcagacacatgtatatccggcagtccatataaatttacatctctgaacaatccaaagaatcggagaaaaagtcctggtcttccagaaaagccgctgtacttcgtttatgtacctccacacacagacgatttccggtttcttttacatacggtgtaatgtcaaattcagacacggtaaagctgtcctccgcatatcccacaaactcaccgtttatccatacgtaaattgcctgctctgccccttcaaaacttaagatcaccctttttccgatcaaggcttcctccagatcaaaaaacggacataagaacctgtgggattataagaagcttcgctgaacatcccctctccgatatgattgcacgtccccgcaggtcggcgatattcatgtccttcccagggatacatggtgttgatataatgaattttgtcatatcccgccagctctatatgctgcggaacctgaatttcatcaaattcagaaatatcatagtcattttcataaaaggaaaccggacgtttttttgcattcactgaatattggaatttccagattccattcaatgactgttttaatgtttcctgtttgtcctgatacgatttttcactttcaaaaaatctgtggtcactgttttcatcataatctcaatggtctgattagtcaataacctctcctcctgtcccttcatccaaaaaaagaaccccgtctccgggattcttcttccactcttattctaaatatagccgccgtatcctccgccgctgtaacctccacagcacaagccgcttccgccgcagcacagattgcacatcatatttgcaatacacagcttcatacaccagtctccgcctacagaacttggatatccatacatactctgtctctgctgataccagcctccgccgccctgcagccgctgcagaagcatctgatactgcatgttctgcggctccagccggactgcttcttttgcatgttccagcgccgtcacgttattgcccacaccggagttcgccgatgcactgtagaaataccacagcgctccacgctctttgatactgtttaatacattgagcgcctccgtataatgtccgctctgaatatagtttgcagccgctcttaagtactggctgttctcatccccggcatctgttctctgctgattctgataccagccgccatatcccgcactgcttcccgctccggaggaatatccacgggaacgctcatccatgatctgctgatatgcctgctgtacttctttaaacttcacttccgcttcttctttcagcggattattaatattggcatccggatgatactttctgctcagtgcccggtacgcctttttgatttcttcgtcagaagcatcttgtgatactcccaacacatgatatggatctgtcattgtcctttgtctgctcccctttatgttctatccctttatgtaatctcagctcttcttgataaatgttgtcccgcacttcggacagcggatctctatctttcctttgcctctcggaatccggattttctgcttgcatcccggacaggtatagatatgataatcctttctctgcgccatcagatttttctgacttttgaaaaatccgcgtatcttcgctgtcttgttcaggaatcttacgttctcatcataacgctttctcacatttctggaaaacatccggaaatatgcataaatgagacatccccagccaagcaggtaaaataccattcctatcacatggtctcctgaaaagacaggtgcaaaaaatgccagaaccaatcccaacaccagcaaaaccttgccgagcgtatccagcactccgtatcgtccctgcataaatctcataaatttttctttcattgtatcgattaccgccttttcttaaatatagaaaacattgtctctcgtttttatccggctgtcaataaagcaatccttaaattactataaactttatggcagccggttgtttcttaagattctgtatcctgattcagcatattcttacacttctcattttccacaagatacacgatctttgaatcggaaagcatcacataccggtttccgtttccgtcctcttttccaaaatacaatgtcacggtcttttctttcttattatttgtatatgtcacggtttccgttgtccggctctgctcatccagtccgtacttactcaagtcgttctcttccacggaatagtcagctgcatccttcaatgtaaggactccaagccctcccgcgattgttgccatactcttggcatcatcgtcattctctgaactgtactctgttttctctgtgccctgactgatgacaacctttttcagattaccgcttccaatcgtagggaatgtatcaagctgtgccatgtcttccatactgtactgaaaatcttcaatgacaccggtgctcaccgtatagatctcttttttctcattcaatgtcagataataagagtctcctgttacatttccgaaatataatgttgtctcattgccgtcctgatcggtgagtaccaccgtatactctggttctttcaatccatatgcttccagagaatccccattttccagttttctttctgcctcaagctttcctaatgttttctccatctgttcaggataactctgagccaacggaaaatctttgtcatccttgtcgtaccatgtaccgtcttcttttacaagctggatttctccatttcccacgtcaaactgaatctcagaaagctttcctaaatctgtgacatagattttttttgcctcttcttccttctgcttgcttttttcctgattctttccgatcacaaccacgcctgcatagaccacgagcagtactgcaagcacaagcagcaggatcagtaaaggatttctttttttcttcattgtccgcctctctccttttggttttctatgcttttctacgcttcatccaaactgcaaatcctgacagaagaattccaagcggaaggataaagatcacaagaagactaagaagtcctgcatgctgcatcgtattgtagaccggtgtcagacttttcgcttcgatcgacagatccttcgccccgtcaaaattcgcagccactgcattcataaacagttttgtattttcaagctgcgggaatgtatctgtaatctccgaagcaatcagacttcctgcgctgatcacggtaaaccgggaggaatcttccactgccacggcgccaagcacatagcttcctgcctgactctgactgtcttctgtgactgcatacgcattatctgatgtagtaataaaggatatcgtagaaatactgtcacgctccggatctgtcaagttcattccgtgtgtattcagaagcagaaccatctgcgattccattccgtctgtcagatcgcctgatgcagtcagctgcgggaagaagcaatagtaattattctgatagcttctctgtgtatctgcaatataaccgtctgcagcttccattccgtatgttttcatgatcgatgcaagattcggaagctctgtgctgttcgtatctcccaaaagaagcatcatcttaccgccgtcttttaaatatgactccacggaatttttctcatctgcagtaagatccgaggtcggagcatacatcagaagcaattcgcagtcatccggaatttccggattcatgaccgtgtttaatccttccagcgtataattatttttatccatcagatcctgaattgtagaagacaatgtcgtctcgccatgtccggatgtctgataaattttgcgtaccacatcactcgttacgtaattcaccgcactgcttaactgtccttctccgtcaaatttcgtctccgatgcacttcctgtgtaatagtaggaagacatatccgtaacaatgatatcactgaaagaaactacttttttctttccggtatcctggcatgagactacaatactgttttcggacgcatcattttctgtcaatgccgaaggatgcagcaccggatcgatccattccacagaaattttagaagacaatgccgaatacttacttaaaaatgtaacgattctttcatcggcctcttctttgtttgccaacactgtaaatttcactttgtgatccatgttcttgagcagctttttgctggtcttggaaatctcataaatttttgtactgctgacatccagatttttatatttttccggaatctgtcctgcgatcagattgacgatcacgatgatcgcaatgaccaaagccgtgattcccacactgtatgaaccatttctggactctgacgatctgaataaattcttaattttctgcatatctcgctcctcctaactccaacgccttttctgaattgtctgtatcgtcagaaatacaaatatgatcagtatcgatacatacagaagcaatccgctgacatccacaatattgctggacgaaatattcataaagacatccgcaagagcaagccgtcccaggagtttcgtcaaaagattctcatacagactggatttcacaaaatatacgatcagtgccgccgcaattcccactgcttcaattccggccgcaagcatccagtttttcgtcatatgataaatataaacaacgatcagtgtcaggatcaaaaggattccgatcattccgctgaacgccgagcctggcagaaaagacaagattccgtcccacaaatacaacaaaagcaaaattccaaacgtactgataaatgcaatgatctggctctctgtcagagacgacataaacatcccgattgccagatacacacatcccaacaggaagaataccgcaatggagctgtaatctaccagaagatatgccgttccctgcagtttgatcaaaagcgggaacaggcagaagatcacattcggaactgccagtactgtcaccatggcgaaatatttgccaagcactacttttgtcagacttaccggcgctgtcaaaagcagctgatctgtttttgttttccgctcttcagaaaaactccgcatcgtcagaagcgggatcccgaccagaaatacgatcagggagcctgagagtgtgtaggagaagtaaggataccccgcattcagattgtatgccataaaataaattcccgtaaacatcaccagaaacgcaataaatacgcaccctgtcatagaatgaaaataggacttcagttctcgttcataaattgccagcatttgtccgttcctcctctccgactgcatcgttttgtgtcagttccaaaaatacttcttccaggcttatccttgaagtctgcagctccaacagaggacattcattttttgcaaacgcaaagaaaagcgcttcccggatatcacatccgccttccgtctgtattctggcactgcatgttttgtccgcccgttcctgggtatggatattactgatatgctctacatttaacaatatcgcccgaacctcggctgcactggcttttgccagaatctccacagtttcggttccgctcatcttttcctccagtctgtccggtgtatcacttgccaccagttttcccttggatatgatcagaatgaaatcgcacacttcccggatctcagccagaatatgcgagcttaaaataacggtatgtttttttgcaagttcccggatcagctcacggatctcaatgatctgcttcggatccagaccgactgtcggttcatccagaatgatgatctccggaaatccgaggattgcctgtgcaagccccactctctgccggtatcctttggacagattgcggatcagacgcagctttacatcctcaagttttgccatttgaatcacctcatcgatggcagactctctctgctgtttcggaatcccttttaattctgcagcaaattccagatattccatcacctgcatatccacataaagcggcggtatttccggcagatatccgatgtgcttttttgcctcctttggctcctttaaaatatcatgtccgtcgatcagtacttctccctctgtggctccaagataccccgtcataatattcatcgtggtagactttcctgccccgtttggacctaaaaaaccatagacctgccctttttcaatcttgaaattcaggtggtctatggccatatgatttccgtattttttcacaaggttctttacttctatcaaaatctcgtcctcctactccctgctttttacaggatttccctgttttataagataagacgataccagaactttgtgaagtttttgtgttataactgtgatatagttttgtactttatttatgcccgtcttctttcctctttttctgcaaaaatccgacaccgcccagcatgcctgctgccagaatcagacaaatgccccatttctcaggtctgatctgtgactgtttctcctccgggatttcttccactttcacggccgttccgtctacctgacttttgggcatatttctttcataccctgtaatctgcgcccgcacaatttcggcgatcaggtcctgtcctgcctgatccggatgcagtccgtccttctggacatgctctgtcaccagtgaattcgccagatctgcaatctgatatccgtactcgctgcttcgcttttccagaatccggttcatattcccgatgatatcctccacgacctgattcatcgttcccggaagctccatctgtttcaccggattgtaaatgttggtcactacgatctgtgcctcttcttttttacaggaagaaatggtatccatagcctctatccactgtgtctcaaattcctgataatcccagtttcccagagcatcaatgatgcgaaagactaaaagcggattacttttcacatgctctgtcacttctttgagcgcctcatccgcacttttaaattttgtatccgtattcaaaatttcctgtgcggtcttcttaaattcattcagaagatcattggatcccattgtgatcaaaatcacatctgccccggaaagactatcctgcacttcctgccctttcaacaccttttcgttgaattctcgagtggcaagtccgtttttcgcataattctgatacaaatatgattttcctgctccctgtgcgatttcttctgccacagtctgtccataacagtaaagctcgggtttgtttgctccgcaatatccttttgcgatactgtcacccaacactacaatctggatcggctccgatgtggcctcttttgcatagctgcatgtcccaaacacactcagaaaacagaccgctgccagagccactgccctgactgctgtttttctcatgtcgatcacttcctgtcttttattccatgaaattccactttacatgacttccatgctctgttttttttacttccagctgccattcgatctgctcttttaattcattgacatgtgaaataattcccacaagtcctttttctcccgccagttctttcaaaatctggatcgcccgttctcttgccatgtcatccagagatccaaatccctcatctacaaacatcgtctccagactcactgcgcccgctgtattttgtacaatgtccgccagccccagtgccatggaaagagatgccataaacgattctcctccggaaagagtttttacatcccgcaccgagtcattgaccaggtcataaacatccagatcaagtcctgcctgcgcctgactgctcaagcttccgatatcccggcactgcaggataaattcctgtccggtcattcttgccaggcgcacattcgccgcatgaatgatctgccggaaatactggcgctgcacataagtctcgaagtccagcttcacgcttccgcttagatttccattggccgtacggcttagattccccatcatttcgtattggctgcgcagcttttcggcatctgaaaaatcacaaatcaacgctttccttgctctccggttgatctcatttcttgtatgcagcgtcatactttcctctctgccaaggcgcagtttttcacgaatgatcgtcagttcttgttccagcttctcgatcggtgcgatctgtttcccctctgtctgctgttttaatgtctcataccgggacgatacttctaaaagagcggtttcatacttctttaaattggcttctctcgcctcccggcttttgatccactgctttgcctgctcgtactcctcttgactttgaaagttctgtttttgaaactctttccgaaaatattcttcctcgtctttgactttcttattccagaggatcagctgggattttttgctttctgcctgtcccagaatccggcttttctcctgcgtcagcttctgataatgatcctgtgcatttttgaacgaagactggagtttttttaaatcttctgtaagcttacgaagagcattttctgcttctttttcatcaaaatccgtttctgtttttccttctttttccagaaatccgacaatcatggactgttctgactccagtcttcccttcactgcctgaaaccgttccaaaacttctgtacgctctttttctgcctgatcccgcattgcttttgcacgttccacctgctctttttttggtgcatctccggataataccgcttttttcggatgactgcaggaaccgcacaccggacagggttctccctcctgcagctctctcgcaagaatgcccgcctgttcttcaaagtatttctgatataaccgctcatatctctgtgaggtttcctgacattttttcatacagtcctgcatatcctgttctgacttttgatactgttccttcagactgtgaacctgtttcaatttcggaagtatttcctggatcctgaggatctgttcctggatcttcggctcttcttttttggaaagtgcctctctttcctgatacaatgcacctgcgctttccaaatcttttgcctgctgtttcagcttttcttcaagctcttgggactctttcttcagattggcgcattctgcctttgttttctgcaattgttcttctgctgcagccgccttctctgcgcggattgctgcatggatctgttttcgcatttcttccgctttgctctcctgccccttcaagatctccaactgttccccggtctttttcagcagttcaaacagatgattggtatcctgtctgtttttcaattccatctgtatcgcatccgcacgtttttcttcctgtgcatttttcttctcctgactcttctcctttgcttccccggactgacagattatttccacacagtccagcacttctttttgaggcggcagttgaaggctcagcagctgttcccagacatctcttctttcatcattctgtgcaatctgcacccgttccatttcccgcctgcagtccatgctgtttttttccaactgaatgtacagctcttttgcctgctctttcagtgtgtcctgaatcttccagaaaatccgtgtatgaaaaatttttgaaaaaatctgctttcgttcttttgattccgcatgcaaaagcttcaaaaaatcgccctgtgcgatcatagcgatctgggtaaactgattgacatccagcccgatgatctcctctatcttcagatcgatctcctttttctttccctgaaattcacttccatccggaagaatcaggctgatctttgcagtctctttgacaaactttattgtcccgtccgcattctttcgtttggaaggacgcaaatattccggatttcttcggacggtatattcctgatcccggtacagaaactgaaactccacatatgtgtctgtctcggaatctgcatactggctgcgcatcatgtttccgtcccgctttcctccgctggttcttccataaagtgcataggttacggcatcaaagatggttgtctttccggcgccggtatcgcccgtgatcagaaaacatccgttttgtattcctgtaaaatcgattctctccactcccctgtaggacccaaaggcagacattgtcaatttgatcggcttcatctattcttcctccatctcttctgcgatcttgttcatcacctgctgctcttctgcattcagcgctcttccctgcatctcctgaaaaaagtccccgaaaatttcaagcggagatgccatgcgcacaacttccgcatctttcatcagcttttgcctggtgcgggaattatccatacgtacctccagaatgtgggaaaataccttctccagctgttccttcggtcgatatggatctgtctcatccgtcagtgtgatactgacatagtcctctttcgcttcctcaggaacagttttcaacaattcctttagtgttcccctgaactttttcacattcctaagcggatgcagtggataagtctccacttccacaggtgtgcccttctctttcagcgtcaccagatgcagagattttgtctgattgcactcactgacagaatatttcagcagtgtccccggataacgcacagactctcttcctaccttctgagcgctgtgcagatgtcccagcgccgcatagtcaaatcgaagaagcggcgtaacatccacattatcaatccctcccacggagaaaatctctgaatcacaagtctctgtcttttgacctgccccggtataaaactgatgcgtcacaatgacgtttcttttggtggtatcaaccagttctctctccagcagcatctgtactgccttactgtagctctccggcatttctccgtcaaacacggttcttacatatcccggtttcagaaacgggagaagataaaaatccacctctccgtattcatcctgaagtgtcacttttttgagaaattcttcctgattctgcggcagttttcctgcaatgtaaatccccttttgcccaagaattccactggcatagtcaatcctttgcgcggaatcatggtttccgctgatgatcaggatcggaatttccggtttcagtgcagaaagtgcagtcaaaaaccagtcaaaaatccccaccgcctcagcagatggtacagacttatcatacacatcccctgcgatcacgattgcatccggtctcagcattctggcatactccaccacttcccccagaatatgctcctgatcttcttttaaattgtactgatgaagctgtctgccgatgtgcagatctgacaaatggataaacctcatcttctattccccctgtatctataattttaatccccgataccggtcaaaacatgcgaagatctcctgcgttctcggacgggccaggctggcaacagaagaggtgctttcacaaagtgcggcaagcgactccttctcaatcttctcttccagcattgccacgacttcctgcaaggtacgtgttccatccagtaaatggcgctgcgcatattttacacaatatccgagagcagttacctgttcgctgtctgtgatctgctccacataacgcagatcgatcgtctcccgattgatggaaatcgcttctttccccaaggtcttcattttgatgcggtcatttcctttccactcccgtccctgctgtggttttcttgcaaaatcaggctttttcgctttctctttcggtccgctcaactgaggaaactgttctgcttcttttttcgccgtctgcgtgatatccttcggcatgtaccgatccatctgcacgatgcagtccgcgatatgaaaataagctccggagcttcccgccacgatcacagtggaaatcccctcttcttcatataactcccggatgcgttcgataaacggcgtgatcggctccatatcccggtggattaccctctgcatcagttcatcccggatcatgaagtttgtcgcgctggtatcctcatcgatcagcatgacacctgctttcgcttccattgcttccacaacgtttgcagcctgagacgtacttccgctggcatcctctgtataaaaatgagtggtatcttttccatttggcagatcattgataaacatggaaatgtccgtttttttgatacttcttccgtcttctgcgcgaagcttgactgctgtggaatcagtgatcacatattctcttccatcacctgcaatatgattgtacacgccaaactccaacgccttcaaaagagtggacttcccatggtatccgcctcccacgatcagcgtgatcccttttcggattcccattcctcttatcacacctctgtgcggcagcgtaatttccacttccatctcctctggagaccggaaacaaactgcgcttttcatcggacgggcggaaacgcctgactctcgcggcagaatagatccgtttgcaacaaaagcacacaatcccagctttggcagtatgtctcgaagtgcctgctggtcctctgccagatcactgatcttctgcagtctcttcgcatcacagtttttatagtagagtgccttttcgacacactccggaagaaactcaaaaaagatccggatccattctcttgcattgatcgtccttccgtttgccggaaatcccacttccagacgaatgtggatatctcctgttttttcatcgatctgcgccgcacttctctccagcacttcctgaccgcaccggctgatagagatcatcccgctcttcccggatccctttgccttgaatccaaatttctcacaacactgtccgaactgccggatcagcgcatcctccaatgctgttttctgccattttgtctgatataactgctccggaaatcctgcaatctttcctttcacctgaatactgaccctggatggagatgcaaacggatctccctgtacatggtcaatggatagcagatagcccggaaactgatacattccctttgtgtctttataggcaggataactcctgtgatcgatccttgtcacaagctgtctcaattctgctgctgtcttcatactttttattccctcccattacaaaaatccggacacgattctcgttcaaatcgcatccggttttttcttcatttctttgattgattaaacttcgaagatcagatctccgtaagaaggcatcggccatgcctctttgtccacgatcatttccagtttgtcgatcggtcttctcagattctccattgccgggcacacttcatcgtggtagaaatttgcctgtaccggtccttcttctttggcagctgcctgtgctgtcacctcttccagacgtgccagagctgctcttgcctctttcaagagtactgtgatctcctcaagtgtctctgcctgtacacttgcatccacacctgcttcctttaccgcaagtactgtatctgcgagcgtttttgtatatttgatcactgcagggataaactgttttcttgccatatcgatcatcgtacgggcttcgatgttaatcgcttttgcataactctcgtactggatttctgcacgggattccagctctgcttttgtaaatactccaaatctctcaaacaatgtcactgctttctctgtcaccattgccggaattgcttccaccatagatttgatgttcggaagtccgcgtctttctgcttccttcacccaggcttcagagtaaccgtctccattgaaaatgattctctgattctccattgcatattctttgatcagatcatgaactgcaagctggaaatcatctgctttctccagaacttcgcaagcctctgcaaatgcctctgccacgatcgtattcagaacaatgttggcagatgcgatggaatctctggaacctaccatacggaattcaaatttatttcctgtaaacgcaaacggtgatgttctgtttctgtctgtcgcatcctttgtcagttctggaagtgttcttacaccggtctccagctttccgccttccagactgtgtgttgcttcccctgtactgatcagctgatcgatcacatcttccaactgttctccaaggaatacggaaataattgcaggaggtgcttcgtttgctcccagtctgtgatcatttccaggatctgctgccgattctctcagaagatccgcatgcttgttaaccgccttcagaatgcaagtcaaaacaagcaagaactgaatattctcatgtggtgttgttcccggatccagcatattgattccatcatctgtaatgatcgaccagttgtcgtgctttccggaaccgttgacgcctgcaaatggtttttcatgaaggagacatttcattccgtgctcgcatgcgatccgctttaatgtctgcattacaatctggttgtgatctaccgcaatattcgcttctgcataaatcggtgccagttcatgctgagccggtgccacctcattgtgctgtgtcttggaagaaacccctactttccagagttcaatgttcacatcacgcataaaagcagcgattctctggcggattgttccgaaatagtggtcgtccagctcctgtcctttcggaggcatcgcaccaaacaacgtacgtcctgtatatattaagtcttttctctgaaggaatttttctgcatctacaaggaaatactcctgctctgccccaacggatggagtcactttctttgaagttgtatttccaaacaaacgcagaagtctgagcgcctgtacattcaatgcctgcatggaacgaagcagcggagtcttctgatccagtgcttctcctgtataagaacagaaagcggtcggaatacaaagtgtagctcctgctgcgtcctgtcttacaaacgccggagaagtacaatcccatgctgtatatcctctcgcctcaaaggtagcccgaagtccgcctgacgggaaagaagatgcatctggttctcctttgatcagctcttttcctgagaaactcatcagcacttttccgcttggaagtggagctgaaataaaagagtcatgcttttccgctgtcacacctgtcaacggcaaaaaccagtgtgtataatgtgtcgcccctttttcgattgcccattctttcatctcatgtgcaatgacgtctgctgtctctatatccagttctgttccttcttcgatcgtctgtttcagcttcttgtacacctttttcgggagacgctcctgcatcactgtgtcattgaaaacattttccccaaaaatatccgctacattgaataattctgtgctcataaaactaccttccttcatttcacttttgtaaacgcattttctaaaaaaggcattccaagcaagcttggaacgcctttgttctcatctacgaggcttagtatacctcaatcaccgcaaaaaggcaagttaaaatttctaacaaatacttattacttacgcttctgcttttccaacagagccaaacagctccattttttcttttacagttgccatgattgcatctgcgcctggttttaataatttacgtgggtcgaatccctttccttccaggtcttttccagcttcgatatatttgcgtgttgcatctgcgaacgcaagctggcactctgtatttacgttgatcttagcaactccgaggctgatcgcttttttgatcatgtcttccggaatacctgtaccaccgtgaagaaccagtggcatatctcctgtcagctgctggattgcatccagagtctcgaagctgagtccttcccagttctctggatattttccgtggatgttaccgattcctgctgcaaggaaattgataccaagatcagcgatcatcttacattcctgtggatctgcacattcaccttttcctacaactccgtcttcttctccaccgatagaaccaacttcagcttccagagacattccgtgctcttttacaactgctaccagttcttttgtctttgcaatgttttcttcgatcggatagtgagatccatcaaacatgatagaagaaaatcctgcttctacacatttcatacatccttcgtagctgccgtgatccaggtgaagagcaaccggaactgtgatgttcatctcttctaacattccctctaccatacctactacagtcttgtatcctgtcatatattttcctgcaccttcagatactcccaggataaccggtgatttgcattcctctgctactgtcaggattgcttttgtccactccaggttgttgatgttgaactgtcctactgcataatgacctgcttttgctttctgaagcatttctgttgctgatactaacatattttctcctccaattctttgcgcacagccgtctgtggcagcgcatactataggtttcactctatggctttcattatatcttatctgccattaaaagacaatctgtaattattacaataaaacaaagaatatacacaatttctttggcagattctgtgatttttttaacaagacaggaacctctcatttacactcctgtctttcctgtttaaaaagcttccgcgcctctgatatcatctgttgaatatgttcatgccgataatccattttattctggcatataattttcaaacggagtataatctttgtttaattgggatgttaagttttatactatttgaaatattccattatgaatatgcatatacattatctcaatgtttcttcttgattggtattctttatgctatagtagaatatcttacaaacaagaaaatgttgttagaaaaattaaacagattacatcaataacttatatgaggcagtaattcccttaaaaggagttactgttttttcattccttatcggacggagttcgcctgccgcaggcatgaattacaggatactcggatgggtatactactttgaattctttgtgaactaaggcttttgggcaaattatttgcaggttaaatttgttttgattttacgcttgataccctacttgataccctgcgcatagacatggtttctttaaaaagctttttgtacaacacagtttcccactggaagacaaaaagacaatcaaacgattatatagaaaaataaacttgaataccgttcatgaaatggtcggtcatacagatgaacgaacaactttaggaaactattgctttgaccgcaacacggaagtagaaaaggctaatttaatcgaaaaaacttcagcttgctaaagtgtaatcaagtgtaatcaaaaattcaatcacaatttcatacatccaccaagcaccaagaaaatttttaaggcttcaaatcccttgaaaacaaaggcttttaggcaaaaaaatatccgcagaactcttctgcggataccctttcaaaagtgactccaaggggaatcgaacccctgattccagcgtgagaggctagcgtcttaaccgcttgaccatggagccatgtcctcatcactgcttcagtgatgaccgagttatatattagcatagctccataggaattgcaaccccttttttgaattttttttattttttttatttttatttttttctatttttctgaaatttcttccgtttccagccctacttcttccagaatctgtgtattctcgattcttcctttcacagacaactgctggatcatctgggattttaccataatccgcatcccctgcttccagttacggatatcgacacagtcatgttctccgccaaactctccatccagcgtccagggaatctcctcaatcgattcgaacttcacttctttggctttaaaggaatacatatgagcagaatcaatctgcttgattaaaagagaggccacgatctcattcagctcgattggatttttcggagtcttgatcagtgtcacttcaaattctccgtcatcaaagatgatctcttttccgacaatccccttgaatcctccgacagaacgtgaatttgtcaccattccgaatacaaaatcatcctctattgtctctccgtcatgtgtaatcttaatatgataagacggaatattaaacagacgttttgttccctccagcacataggccagatgacccaaaacatttttcacactctgttttgtctcataagaaacatctgtaaacagaccaaatgcggctatatatacaaaataatcgtcattgaacactcctacgtcacacgggaaaggaaccccgtttgccgccgtatctgcggcttccagcagatccttcgaaatgtgcaggctgtttgcaaaatcattggtcgttcccgtgggaatatatccgatcgggaccgggtctttacgtctcgccattgcagtcacaacctcatccagagtcccgtctcctccgctgcacacaaccacatcatagctttcggtataagattctgcctttgccatggcatcatgataacactgcgtcggatatacggtcacctcatatccggcttttacaaaaatatccaatacatctgataactttggttttaatacccctgttcccgcattcggattgtatatgaacagcatctttttcatattgctctctcccgtctttctattcttgaaagggctgtgcctacgcacagccccctttactacatcatctattttgtctttttcaaaaaagtcttaattccttctgcagccttttcttcatcttcgccttccgcaacaactgtcacttcatcaccttcctgaagagcaagactcatcattcccataatactttttgcattgatctttttgttgtccacctgaatgtagactttgctggcgtactggcttgcctcctgtaccaacaaagcaatcggtctgccttcaattccatcttcatgccctacaataaccggtgtttcaatcataataatcctccttgttttgcctttccttttctgccagatcacttaattttcttaatctgtgatttaccccggatttgccgacaggcggcgataagagttcccctaactcttttaatgttgcatccggatgtgaaagacgtgcatatgccacttctcttagtccctctgccagtttttcaagccccatgttatccctgagatacgtaatatcttccaactgctttacagctgcagagacggtcttgttaatattggcagtttcacaattcaccttacggttcactgtattgcgcatatcctttaagattctgatattctccagttccatcagagaaacatgcgcttccataatatttaaaatatctgctatctgatcgccctcttttaaatacactacgtatggctttttccttcgtacgatcttcgcatccatggaaaaatcacacatcagtctctgaatctgctttgccatcacatccgaatcgcacacaatctcaaaatgataggatttattcggatcactcatggaaccagccccaaggaaggctccccgcaaaaacgcacgacgacagcatggctgctgtacaataaggggactgacaatatgaaactcttcgaatccacctctgtgctcctccaaaagctttgctgcctgaaggacacgcagtgcatcttcatgccggactatcatcacagaatagaccgcactttgtttctctatattccttcggatagagatatcagcttctatattaaatgtttttcgaatcaatgtaaagacttttcttgcaacagccagattttccgtattgatttttactccgtactgattaaaactgttgatcgtcactgctccgcacatcccgatcaatgctgcgatttctgcaatctgacagtgtcttgcgctgctccactgctgcgaaagctcttcttttactttccctgaaaatgacatcgtgtatacctgctattttccctttctgatggcatccttctcaatatctctgtgttcaatgcgaaccccgtaattctcccgcacttccaggtactgatacaatgcgttggcaagtgtaacggaacggtgttttccgccggtacacccgactgcaacaacaagctggttctttccttccagaatataattcggaatcagaaaatccatcatctggctcaattgcctgaaaaactcctgtgccttatcactcttcatcacataatctctgacctctgcctcattgccggtctttgcgcgtaattcttctatataatagggattcggaagaaaccggacatcaaatacaagatccgcatcctgtggaataccatacttaaatccaaaggacattaccgtgatatacagatttttaaaatcattgccctttacaaaaatcttttccagttccacgcgaagctctcttgtcagcattttgctcgtatccagaataaacgtcgcgcgaatctttaaaaatgcgatttcctcccgctctttggcaattcctctgtcaatatgtcccgctcctcccagaggatgctgtcttcttgtttctttataacgcttcaaaaggacatcatttccggcatccagaaacaagatttcataatggatcccgctttcatccagttcttttaagtatccctcaagcccacgaaatacctgtccgcctctgatatcgattcccactgccgcctgattcagcttggaatccggcatggcgatcatctctgcaaatttaggcaaaagcggcaccggaagattgtccacacaaaagtatcccatatcctccaacatcttcagcgctgtagattttccagcccccgacattcctgtaacaatgacaaacctcataatttaaaattctcctatccgtttcacttctgtctccagatgtactccaaacttctctttcacggtctcctgtacgtgctcgatcaacgccagaacatcctttgcagacgcattaccgcggttgatcacaaatcctgaatgcttctcggaaatctgggcatccccaaccgaatagcctttcagtccgctgtcctgaataagcttgcccgcaaaatagccttccggtctcttaaatgtacttcccgcactggcatactccagtggctgctttgtgattctgcgctccttcaggtcatccatatacgctttgatttcctcaggattgcctttttcgagtgcgatcgttgcgcccagaactatatacccttttgtcgccacaacacttgttctgtaacccagttccagttcttccagagataaggtcaaaaattctccttccggagtcagtacatccgcactttccagtacatgcttcatctctccgccatacgccccggcgttcatcatcactgctccgccaagagttcccggtatcccggatgcaaactcaaatccggtcaaactgtttgaaagtgcctgtgctgcaatctttgacaacagggctcccgcctgcgcatagatcttattttcctctgtccggatctcattcatccgtttgcagatctggatcacaactccccgatatcctttatctcctaccagaagattgcttccatttcctaatatataatatggaatctgttctctcttacaaagaagcagaatctctcttatctcatcctttgactgcactgtcacaaaataatccgccggacctccgatacgaaatgtcgtatgcttcttcatcggctcatctctcaatacattctcttcccctgaaatcttacataattgtttatacaccctgtgctcatctccatttctgttcttgttttttctttcaccatcatacaacaaccttcccgcaaagtaaagcgtacattcgcacattcctccctccccattgcttgcaaaatccggcaaaatgatgtatagtaataaatacctgtatatcaatagagggaacatttttaacaaaaggagtgaacaacacaattggactcgagtgatactttccaatttataattcttgttatcttattattactatcggcattcttttcatctgcagaaactgcactgatgacagtcaacaaaatccgactgcgttctcttgcagatgacggcaaccggcgtgcagctttggtgctggatacaaccgaaaagcatacttccaaaatgctgagtgccattctgatcggtaataatatcgtcaatatttccgcatcttccttatcagcaacactggcttattcattcggcggttatatggtaagtattgcaactgcgatcctgacggttgcgattctggtattcggtgagatcaccccgaagaattttgccacgatacatgcagagaaggtttctcttgcttatattccgattatacgctttttcatgtttattatgactccgatcatctttttgatcgatttattttccagaggctttatgtttctgcttcgtgtagatccaaatgccagaaataatgcgatgacagaagacgaacttcgaacgatcgtggatgtcagccatgaggacggcgtcatcgaatcggaagaaaaagaaatgatctacaatgtatttgatctgggagatgccaaggccaaagaagttatggttcctcgtgttcatgttgcgtttgctgatgtcaacagtacttacaacgaattaattgatatttttaaggaatacaaatttacaagacttcctgtatacgaagacactaccgacaatgtcatcggtacaattaatatgaaagacttgcttttatttgaagataaagcaaattttcaagtacgaaatattttaagagaagcatactttacttatgaatacaagaacatctctgaacttttagtagagatgcgtgatgccaagtttaatattgcgattgtattggacgaatacggtgaaactgccggtattattactttggaagatatcctggaagaaattgttggcgagattcgcgacgaatatgatgaagcagaagaagagctgatccagaaagtcaatgatcaggaatatattgtagaaggttctatgaatctggatgacctcaatgacaatctcggaacagaactggaatctgaagattatgactctctcggaggatttatcattgagcatctggacagacttccggaagttggagatcatatcacgactgaagatcagattcgccttgtagtcgaaaaactggacaaaaaccgtatcgaaactgttcatgtgtatctgcctccaaaagcagattccggactcgaggaaaacgacaactgattttaatactacaaaggacgactggttttgaacaatcattccaaaaccagtcgtcctttttccccaatgtaatttccatcacaacagaaaggatgtatacgatgaaagatttatctgatttctgccctgaatttcaggaagcagctgcttattacgcaagtttaaacacaccttccgaccaggcgatcctggtggaatttttacgggagacccaggatatctttggctgtatccccaatgatgccaaagaacagattgcatcgatcatgcaggtaaagcctgccctgatcgatactctcatccggctttatccgagtctttccagccagacttatcaaaaagaaattattttgtgtacgggaagcacctgcagcagcaaacaatctgccctgcttttaagaaaactggagcaaaagcttcagatccgacagggagaggtaacttctgacggcacttaccttctgcgtactcaaaaatgttttaaacaatgcggacaaggtcctaatatgaaagtcggtgataagatgtaccaccatgtaactgccgaactcatcgatcagctgttttaggcctgctgttttcaggtgctgacgatcacagtcggatatccggctcttttgagcatctgctccatccttgccgcatcttccagtgtaatataattccccactcttacacggtagaggcgatctccttccacaatataagcaggaaaatcctgttctaacagttcttccagcaggttctgtgcatatctttcgtttcggtatgcaccaacctgtacttcatatcccggagattctacctcatgattcgactccagtgtatccagaattccataagcgatcgcctgtgcgatttcttcaaaattttcgtcaaacaatttgttgtctacatctgaattgatgaatccaacctccaccagcactgccggcattttcgttctctttaagacaaccaggttcggtcttgcctttaccccaagattcacaaatccgatattttccagctgttcgttgatgttttctgccatcttaagcttaatccctgatttgtcatatacaagactctctacccctgatactgcattgtctgaaggaaacgaatttctatgaatagaaacaaaaaagtctactcctgcattgtttgcttccattgccttctgataaggagattcatacacatctgtcgtacgggtgtactgcacatccaggccatgagcctccaaaatctctcccaccgccagcgtcagacgaagggtatcatccttttctttccgcactttataaactgctcccggatctcttcctccgtgtccggcatccagcatgattgaatatggcatattctattgatttcctttcctgtccgttctgtaatagaatatgcagattctgatacaaaggtgcaatcaataatgcctttctgacatactcagcattttctcccaaaaatgttcgaactctaccgagaacaagtccatcacttcctgataaatctgggccttcatctcacaggtactggagctgcatatggaatccttttccctcttatgctcctcctgctgcattctgaaatacagtgttttgagcagattggaattttgtgtatgttcacaatccagatacagttctactatatcccgttcccctttggtcaaagccacttcaaatgcatgccgtattgctctttctactctggaggccgtcgtttcgtgcaggcgggcaatctcaaaatataaagagcagatttttccgtcaggataataaggatccgtatcaaataattctatcgcatcacagatatacgtaaatccttttatgctggctggtacccccatttgaagaagtacatcgattgtcttgtctctcatttttctaaccctctcgtttcttgctcgcaccaccacaatgtatctccagtctacgccatatccctgtaaaagtcaacaaatttcttgtaacattttgttgactttatatgattcttgcactatacttgttgctataaatcgaaataggaggatgtctgtatgaaaatcggaaatcaaatacgtcatcgtcgcacagaactgaatctttcccgtggagaacttgctaacaagattcaggtaaccccatcggcaattgcaaattatgagaatggtattagctacccaaaaccggatattctggttgcactcatgaatgccttggaagttgatgccaattatctataccgggattatctttcacccaggacaattcagcgtctttatagaaatgtcctaaggccagaagaaaaagagtccattctcaaatatcgcgaactttctgaaagcagaaaaagtctcgttcgattaatcattgatgaagaatataaacgcatgaaccaaagcgaatatatcaatcttccgttttaccgccccggcattcgtaaagcacactccggttttctttttcaggacaccaatcaaactattcgagtccgcagagagcatattcccaaagacagcgatttctgctttcgggttctaattgaccgctatcagccggtatttcaaaaaaatgacattatggcagttcagcgtatcaatgcctcacacaatgaaatcgggcttttctggttcaatggtatctactatatccggattctctctcaggaaggcagcatccgcaggcttcgttctctcaatgtgattgatcctgatatcgtagtcaatgaacaggagcagctgcaatgtatcggtaaaatcctgggaaaagtttacggaagctatgagatttgcggaacttgtgaagaagatgagacaatacccgaacacgagattgaaatccaataaaaaagcagaatcttgcgccatatttggtacaagattctgcttttttatttttattcctgaacaaatccctgttctttcattacattgacaacctgattgacatactctgtgcatatctcatctgttgccgcttccaccataacgcggatcacaggctctgttccgctttctcttaccagaattcttccgtcacttccaagtgcttctgccgctgttttgatcgcattctgtacagcttcattttccaatgttgtctttttgtctgtcacacggacattctgaagaagctgcggataaatcttcacttcagagcacagctttccaagtgactgtttcttctccataatgacttccatcagcatcagagaagtcaggattccgtctccggttcttgcgtgtttgctgaaaataatatgtccggactgctctccgccaagaacaaatccgttgttcatcatgttttcatacacatatttatcaccgactgctgtctgctcatatttcatgccgactttatcacaagccttgtaaagccccagattggacattacagttgtaactatcgtatttcctgcaagtcgtccctgttccatcaggtattttccgcatacgtataagatcagatctccgtctacgacatttccattctcatccacggcaatacagcgatctgcatctccgtcataggcaaatcctacgtccagattgttctcttttacaaatgcctgcagcttttcaatatgtgtcgatccgcaatttgtattgatatttacaccatccggctcattgctgatcacatatgtctttgctccgagtgcatcatacacactttttgcaatgctggatgagcttccattggcacagtccagaccaatcttcatatctttaaaggaacgtgttgccagtgagatcagatgtccgatgtaacgatttcttcctgccgcataatcaactgttcttccaatgtgttccccaaccgcaagtggaagctcttctgtttttccgtcaatatacgcttcaatctgctcctctacttctgcttcaatcttatgcccctgtccgttgatcaccttgattccattgtcataaaacggattgtggctcgcagaaatcataattccgcagtcaaaatcttctgttcttactacataggacacactcggtgttgttgttacatgtaagaggtatgcatctgctccggaagctgtcagtcctgatgccagtgcatattcaaacatataactgctccgtcttgtatcttttccgatcacgattctggctttcttctctctgccaaaataccatcccagataacgacctactttgaaagcatgttctactgttaaaacaacatttgcctctcctctgaatccatcagtcccaaaatatttacccatatgtctccctcttattctttcttttgaccttttgtgtcactgcctttcagtacgtcaccgcactgacgctcttattatattctttttgattttaaaatacaactgttttctttcttctgtttttcctgtacaatagataacgtacaatcattcataatgggaggaaatgatgataaaattaattgcaagtgatctggatggaactcttttacaaaacggcgcccaggcgctcactccgcgggcgattgatctgatttccagactgtgcgatgccggaattcattttgtatctgccagcggaagacagtatgataatcaaaaacgtgtctttgcacctttaaaggaccgtatttcatttatcgcagaaaatggctcaatctgcatgcatcagggaaaagtcatttcccgtgctacgatcaacgatgatctggcagccaggattttaaaggaaatcaaaaaacaggaccactttgagattgtagtttccagagaagatacctgtttcatcgagaacaatgtaccggagtttgtcaaccatatcgtcaatgtcatgcacaatactacgcaaatcgttgatgatatcacaaaagtagatggaccgatcttaaagattgccatctgcaatatgtctgacagtactcatattgtcgataaatatttaaaacatctgcaagatctctttggttccgagatcaaagtcgtcacctctggaaacatctggattgactttatcgctccgggaagcaacaaagggacggctcttcagaatctgatggacttattccaggtaaaaccggaagaatgtgttgctttcggagatcagtataatgacatcgagatgctccaacttgccggcaccagctatgccatgtccaatgcagctcccggaatctcttactattctacctatgtgacagattctgtggaagacgtactggaagacattcttgcacaggttcgttaactctgccgcaaaaaaggatgataactgcatcagtccatgcagttgtcatccttttcacactttctttgatacgttacatgttatctttcttcgatctccatgatcatatccacacgtctctgatggcgtcccccttcaaactctgtattcagccatacatccacgatcatctttgcaagctctgctcctactaccctcgccccgaatgcaagtacgttacaattgttatgcgctctggacattttcgcggtaaatggctcgctgcatactgctgcacgcacacctttcaccttatttgccgcaagagatatccccagacctgtaccgcagattaagattccacagtccacttcttttgcaacaactgcacggcctactgcttccccatacttcggatagtcgcagctttctgatgaatccgttccgaaatctacgacttcatgtcctttttctttcagaaattcgatgatctctgcttttaattccaatgctgaatggtcatttccaattccaattctcataatctctctcctcgtatctctttctttttccaattctcttctattgtccaatatccaaagataattgtcaagcatccgcatgtactttctgctatacaaaacaggcacaaaagactggctcttaccagatcttccatgcctgtttcactttttcaaacctgctatttatatttgttgttgtaaataaacaagagtgtcagcaagcctaccagtcctaccagttccataatcagtcccggcacgccgatatttttctgtcctatcatgatcagggcgaggcagacaacaaaaacaatagccatgatcaaagttcgaatctttccttgcatttttgtctcctcctatcctttgagtccaccaagtgtcataccttctgtcagtctcttctgtacacagatatacagaaccagtaccggaatcataacgatcacaagacctgcatacataataccgtagttggttgctgttctctcgactgccatcagattcttcagtcccattgccagtgttccgttttcatccatcaatgtatatgcgataatatattcattccagaatgtcaggaaattgaacatgattaccgtcagaatacttggttttgccatcggaatcatgatcttaaccatcgtcttaaagtatccgcatccatccatataagctgcttcttcaaatcctttcggaagtgtctggaaatatccgctcagcagataaatcgtaaacggcaggttacaggatgcgtagatcagtgccaggataaaccggttatccaggaaaaaatctacatgcagagccttgttccaggaactcagcatcaaaaagatcggtactacaatgtaattgacattgataaacaatcctgccatgaacgcaccattgaagaacttctttcctctgaacttaaagcgtgccagcacataagatgccggaagagccaggatcagaagaagtgcaagagccagcgctgtcacaatgaaagagttcaggaagaaatctcccattcttgcatcctgaaatgctactacaaagttctgatagtaaaactgttttggaagtgcccatggatttacatccgctccaatgaattctgcattcttcttcaaactcgccataaatacccatgcaaccggtacaatgatcgaaatagccagagcgatcagagctacatagataaaaatcttgtaaagtacatgtgtaggaattctgtgttttttctcatgcatatctctacttcgctcctttctagaattctaagacttctctgtctgtaatcttgtttacaactgctgccagtatgaacgagaagaggaatacaacaactccgatcgccataccgtatccgtatacacctgctccatatgcctgcttgtacatatagttcaggaaaacttctgtctttccgttcgggcctccgtctgtcatgatctgaacaaacaggaaacttaagttgatcgtactgatgatatagaatgtcaatgtagtacggatattgctccagatcaacggcaaagtcacctggaagaaaatctgaatctctgttgctccatccagtgatgcggcctcatagagatcttccggaattgctgccatactggacatatacatgaccatataatatccgattgcctgccataccagtgcaaagatcacagaataaataacaatactcggatctcccatccactgatgctttaatccactcagatgaatcgcatccaaaaatgtattgagcagtcctgtactcggattgtagattgcaccgaaaatacctgcaataacaacaatactcaaaatgtttggtatgtaaaaaataattctgaagaaattcttgcctttaaagttccctcttgaaagtaacgccgcaaataaaactgcaagaacgatcgtacagatcattaccattacaatgataagaatcgagttctgcatcgcttccagaaagttcttatcatccatcagttttacaaagttgctgaatcccacaaaactcttcttatttgtaattccacccatgcggtacaaggacatgcggaagacattgatcgtcggaataaatataaagatcgttgccagaattacagcaggcgccagacaaatgaatataaatcttctctgcgctttctccctgttcatagatttcctcctccatactgctgtcttttaaaaacggtgagttatcataactcaccgtttcatgtcagccgaatatcactcttttatttctctaatgcgtctgcgcatttttcccaagtctctactaactgtttctgccattcatcaactgtcatatcgcctgtgttgatagactcgatcggtccgtaaacagcttttgccatatccagtccttcgatcggagctgttgttgcccatttacctgtaacagctacaacgtcatctgctgttgctgctgcataacagtcttttgtaacaccgtctggaagcttgtctgctgctccttttacaggaactactactggtgtatcagattcttttccggactctttgtctgttgtcttgttgttcagacagatatcaactacttcgtcagaatacatgaatttcacaaattcttttgcaagatccatgttcggtgcatcagcaggtacccacatctgctctgtaaatgtgtatacagactgtgattcatcttcgctccatttcggaacacccatcataccccattcgtaatcttccggagtagaagctgccatctcaccgatcacccagtttccgtttggcataaataatgcttttccatcgattacgttctgctgattgatcttgaatccaccgtcagcgtttgcattggaaactgtatcttcctgtgtatagtcttttcctacaagttttgcaactgtatcaagaactttctttccttcatcagatgtccatgtatttgcatcatattttaatgcatcattgtagaaatcaagtccgcctgcctgtgcgagcattgcatagattgtagcatcaaagtatcctgttgtagggaatgtaaagagtgcatgtccgtctttcttagcctgctcgccaagtgcgaagaactcatcccatgttgtcgggatctcgtactgttttccttcacctaccaatgtcgcattgtaccagaatcctgtcggtgtgtagaaaatcggtgccagataaatctttccgtctccgtatggctgtgcatctgtaccatccaggataccatccagcatcttgtctttcagttcgtcatcgaatacatcagagatatccgcaatcgcttcttccttcagcattgtctctgtgaatccacttggctgtcccaggttgtaatatacaacgtccggtacatctccattctgaattgcttttgtcaggtctttgtccagttcaggagacatctcaagttctacttttactccatcatgagactcttcaaatgctttcgcgatatcttcccagatctgagttccgttaccaccttcgaacgcagcaactttcaggactgtctcttctgagcctttgtcagcatcttttcctgaatccttgcctgaatcatcacttgatccgcatccggccagcatagaagttgccatggcggaaacaagtgcgagtgccatcagttttctaaccactttctttttcatcttatatcctccctgtcgatttgataactttatgatagctcatttgtctatatttttctattcggaagttggcttggattttataattattgctatttcaccttagtttttttaataaaaacttttttctttgtaaattaagtcatttcaataagtataactttatattttttatcacttttatacaatttatttttcttttttcgacaatcagatcatgggaacctgtttattttagacaaattccgacattatacggatttgcggatattttgttttttattcttcacttccggtcagaagacggatgggagggctttttcaaattgttccacaatttctccactttttccacatttggcccggctgccttcacagaaagaattgcctgtactgcattctgcaacggattgttgatgctggaaagcaagtataaaatactcagcattgcatttgccggtatgtttccttttgcagccatccaggcacagaataaaatctgaacaaacaatgttccataggtcagtgaaagagcaagtacttcaccactgctttcacagaatcgagcgtgataacgagattcttccacatccttcacataatttccaaatatcgcttctgtttccttttcaatctgaaaactctggatcacttcaaatcccccgaagaaatctttcagtttccccgtgtattgctccagactccgataaacccttccctctgctttcgagatttgttttccaaatagaaacggtactgcaacgggtatccagacggtcataagaaccatacctgccacccggctatcgtaacaaaaaagcactgccagacagccaagaaaaacaaagctctgctgaataatctccggaatcttcgcaaaatagttattctccaaatttgttacatcactattcagtattgagagatacatcccactgttgttgctcgtaaactggatcatatcctgatccagcactgcatcgaacacatccctcttcagctgtatattgatccgcttcagaaatgtcctccgaaaataagcgcaggcattctgactgactgcataataaaaaacagtaaacaaaagaatccctgccagtctcaaaatcgctgcctttgtcatatctcccggcaattctccaattttctgaaacacaaatgcccacatcgtttcccccattcccaccagaatggaacataagatcacacctgccagatgccccttatttctttgaaaataaacatgaatcgaacctgttttctgtatcataatgtcctcccctgctaatggttcacggtatagaggctatagaaaaattgctttttcttcatcaactcttcaaatgtccccatctccacaatctttccctgatgcatggtcaaaatgcagtcatactgtctcaaaatcgactcatgaaatcgatgtgttacattcaatatggtggtctctttttgacttaagatcaactgctcgatctgcatggaaagttctgcatccagactggacgttgcctcatccagcaataacacttctgccctggttaaaattgcccttgcaatcgcgatccgctgtttttccccaccggaaaaattattgccattttcgcaaaccatctgctctgtccccaatggattgtcttctacgattttctcaagtcctgccttttttactgcagctttgatttcttcatccggatattcctgaaacatcgtaatgtttgcccgcaatgtatcttcaaacaaaaacacattctgatggatcatggctattttccgacttagactttttctttctatcatccgaagttcctgttctcctatgagaatttctccctcgtagtctttataatagttcgccagcagcttcaacaacgttgattttccgcatccgctgcttcccacaatggcatactttttccctttctcaaagcacatattcaccccatgtaagacctcttttgctttcgtgtagccaaatcgtacctctttcaactccaacggcatgactgattttaccgattcccctgttttcttcgattcttccggtctttccttgaaaagcgtctccacctttcttgcatttggaattgctgccttgacatccaaaagcagatatgcaatctcccggatgggattgttgacactggagatcaaataaaaaatactcagcagcatccgctctgaaatacttccgataaataccagatacgctgagacaactagctgtatactcaagatcagatacgtcagcaataacgtcaatattccgtatggattctgatatcgtcttccctcataacgccgtttctccacatcttccacacttttcgcaaaccgttttttcacttcgtcctcaacctgaaaactatgaatcacttcaaaaccacccatccagtctttcagcttccgattgtaattctcaagttcttcatataatgctttggtcttctgtgacaatttctctccgattaaaaatggaaccgccaccgggagtaatgccgtcaaaatcaccagacacacgatcctgacgtcataatagcagagtacacccgcacaagtcagaaatacaaatccattttgtaaaatctccggaatcttcgcaaaatagttgttctccagatttgttacgtcattgtttaacacagacagatataccgcgctgtttttctccgtaaactttgccacaccttttttcatcagcgcatggaatacatcctgtttcaattgtgtattgatctgttttaacaaccttctctgaaaataaaacatcagctgttgactgaccacaaaatacagcagacacaatcctgcagacagacataattgctggatggaggtgtctgccgttcctcctgcaaatccactggcctgttcaaataaaaatgaccagagcatgtaagaggttccactcatgattgaaaaaataacaaatcctgtaaggatccccttatttcttccgaagtagccgtgtacgaaaatctgttcttgcatatcacatttcccctttcacagttctcattatcaaagaaaacgcaaaaaaatcccatgacgtaatcgaaaaacatctttcccgatttcgtcatggaattctttcttattgtatattaatgtatcttttccttcgatggccagtttttctgtatataatatttcaaagaattttgcaattccagatcaccgaacatttcactcaaagcatatgcctgttcaaattgctcttttctcacatcctgcccggcctctttcatggcatagatccggtttgcaaacaacatgtctaatggtccttttccttttttcaaaaccattcggattccctgttctgccagtgcaattccttcttctactttccccacttccgggagcgtatttgccaaattgctccagatcagcatcacttcctgaaaatgatgttccatccgcacctcactgttaccataaacttgcaacaacaacttccagatttctaccgctttctctttttcaccacggatcttttctgcaagagcaatctgctgtagcaggactgcctcctgatcggtaaatccatgtctcgttccagttcgatgtgcttccatccgttcttcaaatgctaacgtgtaggacaacgttttcttgtgctgtctgatccattctccttccgagatcttgccctgctgatattccagacatgtgcgatatccctccacatactgcctgttgatcttcttgctcagatccaacttctcttccagcttcttttgacattcttcccaggtttctaaatccaggttagaaaccgccattctcaacttctgtgtcaattccaacaccgaaaaatcatttgtccatacttccccgatgaaatatcccggcttgatttctaatctattctccaaagcttccagatttttcaaacttggacttcttttccccgtctcaatcctggaatatgtctccggtgtacaaatcccctcgctggcttcttcctgtgaaaatcctttttccactctggcagaaagtaaaatctctggaattaaaaatagattttccgaaatctcaatcccccactccatccatgtcgtttctacttcaacttcctgatatatctccttcagcgcatttttccacacttgataacaatctgcatttttcccaaaatatctggaatctttttccaaatcctccaatatgctcactgcatactcaaaactttgattttgcacactgttttccagagcctctttacataaaaaatagcgtttttcagaaaactgcttttcctttacttcctggcaatagatagaaacagctcttggaaagatctgattttttgcctgaatatctgttatatgctcctgaatgtatagaagaagtgcttccagcaattctcttccctgctccgtatccctttgcatcttgcactttgcgtaaaaaagcaacaaatttaattcctggatactaaacaaatcctcttcttcaatttttcccgaaaactcaggatgagtcagccgaatcgcttcctccaagtcagaaatatctgcatatgttccctttagaatcccttgaatatagcgataaaactgctcctgtaacgtagcattaacagccccatctaaagcttcctttttctgcagcaactcctgtgctaaagaaatatttttctttctaagcgcctctttcacctttctcttccactcaaaataagcgtactcctgacaggaaatcatggttgtcagctgatcagatgactttcccaatctctgaatcaatgcattcatcagcagacgatccgggactctctctccattttcataacgcgaaagagcagaaaccgcacataaacctctgcataatcgttcctggctgattccctgcttctcccgctcttttgtaagaaataatgaaaatatcgtctccatactatctcaatcccattcccttttccaactccaacagatactgcttcacttccaacccacaggcaaatcctgtgatatctccgtttttatggatcacacgatgacatgggattatgatcataatcggattcttattgtttgcctgtccaacagcacgtactgctttctcattgccgataccaatcgcaatctcctggtaacttctcgtctccccatacggaatcttctgcagctcctgccagacactctgttgaaattgcgttccctgatatttcaacggcacatcgaattgcttccttctacccgtcaaatattcattcacctgcgtatagacctcatacagaaagtcggaatgcaattcattcttcatggtttgcacagaatttgcttcccaaaagagctctgtcagcttttgttcttcttcgcgtatggtgagaaaacctatcggggtgttaaatgtatatgaatccgtcatatcctgttcctcctactgctcatcacattttcaaaaaagcacaacaaccgattttatctacctttttcaatcccaacgactgataaaataaaatcgtcttttctgtattgtctgtcatcagttcaatctgatacacatcctcacatctctctaaaaccgcacgcattagttgactcccgatgccctttcgttgatattccggatgcaccagtaaatcctgaattaaaatgaccgatgcaccatccccaacaactctgaccatgccgatcaattgctttccttcaaaagcagcaatctttaaaaatgaattctcatatgcacgctccagcatttgaggattccttgtataattttcccagccaacactggtgtaaagtgataaaatttcttcctgattgaaatctgtgtattcccgtagttccatgcaaattcctcctgttggtatccattttataatcaattcagctttgctcaaagaacagcttttacggtatgatttttaaagataaaaacacaataaaaatctgattatccgctaaaacacagtatctatcagcattttcaaggaaacaaacacatcaatttactacttatttactactaacgaatgagccttgatacgcaagttttcctagatatgcaaagatatggtacagcacatcagtattgaaacaagaaaaaattgaataacttatagactatggaacgcctaaaatgacgttccttttctatttccagccgttcttattggacggctattttattacccaaaatgaaaggagcattagatttatgaaaaagacatggaaacgattgtgtacgggcttcttagctcttgcaactgtcgttactgctttaccgactacacccgttcatgcagaaagtaagcaatactggacggagtcaaacgagcgtgtcggtatcgttgaaaaagtaatgaatgacggttcgattggttctacctttaatgagggacatttaactgttgagggcgaggacgcttactgtattgacattaacacagactttaagaatggttacaagaccagagctgacgcaagctcacgcatgagtatcgaccagataagcgacgttgccttatctatcgaatatgtaaaacagtacacagacagccacagcggaataggcaaaaatcacgcttaccttttaagacagcttgtagtctggcagagattaagcgtacatcttggctggcaatgtgataacgtgcgagcttcttatgatgaaattccaaaggcaacgcaggacgaagttttcgctggtgcgaaagcctttgtcaaagaaaataaaggacgctatgaatgtggcggttatatctactctggcgaggggcaggaattgggacaattctgggcgaagctgaatgtcggaaatgcgaaactgcaaaagacttccagtaataccagcattacagacagtaacgggaattactctattgcaggtgcaacctatggtgtcttttctgataaggactgcacgaaacagcttgccacccttacgactgatgaaaacggcaatacagatgttgcagaggtaaaagctggcacagtctatatcaaggaattatccgcaccagcaggatataaagtagataaaactgtatattccttaaaggttgaagctggaaagacagctaccttgaaagtatcagatacaccgaaagtaacagacactttgattgagcttttcaagattgatatggaaacacagaaagacaatccgcaagggaacgcttctctagcaggtgcggaatttacatggaagtattatgcaggcttctatactaaagacaatcttcctgccgaaactactcgtacatgggttacaaagacaatcgctgaaacagacagcgacgggacaacccactacatcacaaaattagcggacgcatacaaggtatctggcgacagcttctatatgcaggacggtaaagcggttcttccacttgggacactaaccgttgaagaaacaaaagctccaaacggctacttgttagacggtgcatatatgcaggctggcgataagtccgaacagattaagggcttatatgtaacacagattaccgaggacggcgaccttgccgtactatctggaagtaaccagttttccgtatcagacaaggttatccgtggcggtgtcaaaattcagaaacgagatttagaaacgggcgatacaaagccacaaggaagtgccactttgaaagatactgcctttgacatcatttccttaaatgataattctgttttagttgagggaaagctatacaagaaaaatgaagtggtaaagacaattcgtacagatattgagggtgtcgcttctacttctgctgacctcttaccttatggaaaattccgtatcgttgaaagtgaagctcccgacggttacttaactgacggtgcaaaaacgattgattttacaatcacagaaaatggaaaaatcgtggacttaaccgacgaagcccattctatctacaatcagattaagcgaggggatattgagggtgtaaaaatcggtgcaggcacacacaagcgtcttgctgatgttccgtttaggatcacaagcaagacgacgggcgaaaatcatgtagtggtaactgatgataacgggcagttctccacttctgctgaatgggcttcacataagcataataccaacgcaggcaagaccagcgaggacggtgtgtggtttgggacttctgaaccagacgacagcaagggtgcgttaccttatgatacctacatcatcgaggaattacgctctgaaagcaacaaaggctttgaacttatcccaccttttgaaatcgtggtatcaagaaataaccttgtgattgatttaggaacgctgactgatgaatacgaaaaagaaatttctatccataccacagcgaccagcaaggacggcgaaaagactatccttgcaggaaaagaggttacaatcgttgatactgtaaaattagacggacttacaaaaggtacaaagtatcagttgaaaggttggcagatgttaaaagaagaaaatgccgagcttatcattgacgggaaacgtgtagaaaacgattatacctttgtcgctgatgatgaggaaatgaaagtggaaatttcctatacattcaatgcgtctgctttaggtggcaaaacccttgttacctttgaagaattgtatgatttaagcaatccagacgaacccgtgaaagttgcagaacataaggacattgaggacgacgggcaaacggtacttatcacagagcgtatcatcaagatacatactaccgctaccgataaggacggcaacaaagagattgaagctgaaaaagacgttacaatcattgataccgtaaccttagagggcttagaagtcggtacacagtacaaacttgtgggctggcagatgttgaaagaagaaaatgcagagcttcttatcaatggaaagcgtgtggaaagtgattatatgtttaccgctgacagcgaaactatgaaagtggaagttgcctttacctttgacgctacttctcttgacggcaaacagcttgtaacttttgaagaattatatgatttgagcaatccagacgagccgaagaaagttaccgaacataaggacattgaggacgagggacagacgattatttttaaggaaaagccagaagtcccagagaaacccgaaacaccacagacaccagagaagccaaatagacctagcgacagtcccaaaacgggcgataacaccaacctttacggactgcttgcacttcttgtgacttctggtgctgggctggcaggtatcttcttctataaacgccgtaaaatgaagaaatcataaggcggtaacggtatgatgaaagaaaaatcacgctctccgccgaagctgtcaaacggcagacttttgcttattctggcttgtctgctacttacctgcaagaacacagatagtcaagggtgcgtatgcattgattttaccctttactatctgggggattgctggtatttacccaaccgccagaataagaaatcacaatcaataaacttatcaaaaatagaaagaaacgaggtaaaacactatggaaatgaaatatgtcgtgccagatatggcacagtcttttggaactcttgaatttgcaggcgaaagcgagccagtctttgaaagagataaaaataaccgcagggttttagccagacgaagctataacctttattctgacgtacagaaaggcgaaaatgttgtgatagaaattcccgtgcaggctggcgaaaagcatttcaagtatgagcagaaagtaaaacttgtcaatccgaaattatacggcagaggttacgcaatcggggatatgggacataccgattatgtgttagttgctaacgatattgtagcagttgaagaaaagtaaaggagtgaagaatttatgagattatcaaacggttttgttattgacaaagagaaaacatttggagaattaaaatttacagcggtgcgtgatgtgttcttgcagaatgaggacgggacaccgagtacccagcttaaaaagcgtatctatgatttgaagtgcagtctacacggtggaattatccccgtatctgtaccgccagaagtaccgttaagggaatttcagtacaatgcagtcgtggagcttgtcaatccagtagccgatacggtatcacgaaaaacctatacgggtgcagatgtggactggtatgtaaaggcagaggatattatgttgaagaataaaagcaatcaaaacgcaggcaatccacagaaccatgcaccgcagggacagccgaaaaaataaaaattctcctcaaaggttagagaaataactggactctcctgttagtagattgcctaccttatcgtaaatggttaaaataagcctaggaggtggcaacaaatgtatcaaatcaataatgaaaagttcggacaatttttagccgagatacgaaaagaaaaacaaatgacacaaaaggaattggctgagaagctgtttgtttccgataaaacggttagtaaatgggagcgtggaaacagtatgcctaatgttacactacttattcctattgctgatgtgcttggaataacagtgacagaactcttgaaaggagaaaaattaagagaagaaaagacactgaatagtgatgaagtggaaaaccttgttgtaaattcgttagacttatctttgcgtaatacaattcgccaacgaaaaaagaattggatatttgcatttcttatctcaatcggtgtggtaattgtagaagcaatattattaaccgtttctggaatttccatagaacaaatgggagatagtttgtatatatctttgttaatgcttttgtttgcaagttggctttgcatttttgcaaaagaattattaccaacatattatgatacagataaagttaattttgtatcacaaggaatttttagaatacacatggcagggttatcctttaataatgcaaactggggatatgtattaacagtatttagagtatttacattggggattgctattctataccctattatctgctatatcagttttttaattggcggtgtttcattatgggatactgtaaaatatccagctatagtcattctactgataggactgttagttgtaacctatatcgttggaaaaaaatatgaataatcatattaaatggagcttgtcaatccatagaaccatgccccgcagggacaggcgaagaattgacgcaaacactttagaatttcattgtagcagatatatgtaactgctataatatagacatgagataagataaatcttgagtttatggaggcagaagcatgatgtataaaacagaactgattgaagaaattaccgttgaaaatgttactgataaaataaataaaaaaatatcagaaatggaaaaagaaagttatcggcttataactatgtcatttttagggacagaaagagctgtattggttttcaaaaaagggttaaaaggtagtttgctttaggggagaaattatgatgaatttcagttttacaatttcatagccgtatatacaaggaagttaggcttcgggttaaatgatttttgagtgttgtgggggtatatagcggaatgatataattcttataaattgtgaggtgcttatattatgaaagtattagtgagttcatgtattacgggaaaaaactgtaaatacaacggtgggaataatcttaatacaaaagttgtcgagtttttaaaagataaagaggttatcgaaatttgtccagagttattagcaaacatgcctacaccacgtcctagtgcagaaatagtaaatggtgttgttgtggacacaaatggaaatattgttgataatgaataccgtcatgcagtacagttggctctaaatgaaataagaaatatgcaaatagatttagttattctgcaatcaagaagcccaacttgtgcagtaaagaatatttatgatggaagttttacgggaagattgataaaaggtcaaggtctatttgcacaggctttaattaaggctggatataaagtgttagactctgaagattttaaataaatgataataaagtgagcagttagtcttaggattgactgcttttttagtacccagaaaggagtgatttatttatgcgtatgatttggaacaaaggacaccgtatcagagccagcgacaagcaccttgtctaccacttttccatagggacgcttctgtttgtatttgtggcggttctcctgctactgaatagcaaacagctcatgcgtaccgattgggagcatttcagcttgttagaaaacggcttcacgctctccccttacaacttcatagccatactgatagcgactggtgcttgtgtattggtcgcttttctgtattaccgcttctgttatgacaatttcaagaagctcctgcaccgtcaaaagctggcaagaatgatactggaaaataagtggtatgaagccgataccgtacaagacagcggtttttttactgacctgcaaagcagatcaagggaaaaaatcgtctggtttccaaagatttactatcaaatggaaaaaggcttgcttcatatccgctgtgaaattacactggggaaatatcaagaccagcttttacggttagaggataaattggaaagtggcttgtattgtgagctaaccgacaagaccctgcatgacggctatatcgaatataccctgctttatgatatgatagcgaaccgcattaccattgatgaagtacgggcagaaaacggctgtcttagactgatgaaaaatcttgtctgggaatatgacgcactccctcacgctctgattgctggtggaactggtggcggtaaaacctattttctgctgacgctcattgaagccttactacataccaacgctgtcctttacatcttagacccgaagaacgctgaccttgcggacttggggacagttatgggaaatgtgtatcacaccaaagaagaaatgattgattgcgtcaatgctttttatgagggcatgatacagcgaagtgaggaaatgaagcgacacccagactataagacgggcgaaaactacgcctatctgggactgccaccctgctttcttatctttgatgaatatgtggcgttttttgaaatgctgggaacgaaagaaagcgtgggcttacttagccagttaaagaaaatcgttatgttaggacgacaagcaggttatttccttatcgttgcctgccagcgtccagacgcaaagtatttctcggacggtatcagagataacttcaatttccgtgtggggcttggtcgtatcagcgaattaggctacggtatgctgttcggttcagatgtgaaaaagcagtttttccagaagcgtatcaaggggcgtggctactgtgatgtgggaacaagcgttatcagtgagttttacacgcctttagtcccgaaaggacatgattttttgcagactatcggctctcttgcacaagcaaggcaggacgggacggcgacgtgcgaagcgaaaggcgacggcacggactagccgttgctggtgtggcgtaagccacgccagcaggtaaaacccctcggtatctaacagaggggtacgtttgcaaatggacaaaagacaaaaaacataggaaacataaggcttctggcatggtttcctagcaaaaatcgactgtgaagtcgtcttaaaaaacttcacactttacagattgggggtatggttctgaatgaagaacaatggataaaagaattacgggagaaacggattgcttacggtatctcacaaggcaggctggcggtggtttctggtatcacaagagaatatcttaacaagatagaaagcggaaaaatgaagccgtcaaaagaacttctggaaactttgaataaggaactggcaaggttcaatccagaagcaccgcttaccatgctgtttgattatgtgaaaattcgttttcccacgctggatatacagcacatcatcaaagatatattaaaactgaatatcaattatatgctccatgaagattacggacattacagctatacggagcattattctttaggggacatctttatctatacgtcggctgacgaagaaaaaggtgtccttttagagttaaaggggcgaggttgcaggcagtttgaaagttacctgctggcacagcaaagaagctggtatgacttcctcatggacgcactcatagacggtggcgtgatgaagcgtatcgacctagctatcaacgaccatacgggcattttggatattccagagcttgcggaaaaatgcaggaaacgggaatatatcggaaagtccagaagttataagttttaccagtcgggcgagcttatcaagcacagagagaacgacagagaatatatgggacgtaccctttatcttggttcgctgaaatcagatgtgtatttctgtatctatgaaaaggactatgagcagtatgtcaagctggggacaccgcttgaagaagccgatattatcaaccgtttcgagatacggcttagaaatgaacgtgcctattatgcagtacgagatttgctgacctattatgacgcagagcagaccgccttttctatcatcaatcagtatgtacgatttgttgatgaagaacccgacaagcgaaaaaatgactggaaactcaatgaccgctgggcttggtttatcggcgataacagacagagcttgaagctgacgacaaagccagagccttacaccttagaccgcacattgcggtgggtacaaaggcaggtagcaccaaccttgaaaatgctgaaaaagattgataagggaaacggtacagactacatggaaacaatcgaacagcaggcaaagctcacagaaaagcatgaaatgataatcaaacagcagacgacccctgcaaaagatttagtagaaagttaggagtaataaaaaatgtgggtattattaaaagacttcctgctggtatctatgggaatgggtatcggcgtagtcttgatgtgtattttgaatgtcggcaaagaagctgactgtgaaatgaaacaattagaagaaagtgaggacaattaaatgaatttcggacaaaatttatatcaatggtttttatcaaacgcacagagcttagtgcttatggcgattgtggttatcggtatctacttagggttcaagcgtgagttttccaaacttatcggcttcttggtagttgccttgattgctgtcggcttagtattcaatgctggtggtgtgaaagatgtactgttagagctgttcaataagattatcggtgcataaaaatattgaattgaataaaaaagaggtatataatacagttttgtaaaatactaaaataagattgatgggaagtgtatcatttgaagaagttagtcacagtatcattgaaaacaattatcttttttatgggttgggctgtatgtgtgggagttatgcctatacctgcaactaaaaatcttgctatttggagattttgggcagagttatttccgttattatcaataattggtataacagctatattttggttgatagataaaaaaaagataaaattacatttgattgataaacctgtttacaatcttatactgggagttattattgggacaatttggttaggtgtgtctttgggaatattaactttcataggtgtaatacaattagatggaagcaattcagtttctatgatttggttatggttactttctgcttttatcaataccattatgcaagaaatgttggtgcgtggttatttgtatcaaatgataaagagcaattacaatattttatcagctattatagtatcaacgggattgtttacatttgctcatgctggtgcttttgaagcaggagttcttccggttttaaatgttattaccatgagcctttttatgacagcagttttggaatacacgggttctttgattgcacctatcataattcattttttatggaatggtgttggtgcaataattcttggtggagtatcattagcggaagattacccacatctactcaacatgataattagtggaaatcctattttatctggtggtagctgtaaaattgagggtagcataattgtacttcttatgaatatagtaatgataataggttttattatagcaaaaaagaaaagaaagaaagtagaataataaactaatttttacaatttcatatccctacacacaaagcatttagtcttaggattgaggtgttctattatgaatgagagagaaaaaatcattcgcttatggttcgatatgtggcttaaacagcaagatttaggaatggatagaatttttacagaagatgttgtttatacggaaagctggtgtcctaaatatgaaaaccttaaaacagtaaaacattggtttaatgaatggaatactcgtggtaaagttattatttgggatattaagcagttctttcataagggaaatcaaactgttgtagagtggtattttaaaaatgaaatgaatacaggaagtattgaagaatttgacggtatttccttaattgaatggacagaagataacaaaatcaaatcattaaaagaatatggttgcaatttgaataactacaatccatatcagcacagcgatagccctcaatttagagatgaaaaaataagctggttttaaaacttaatcaaattatatctatacacacaaagcagttagtcttaggattgactgcttttttcttacctaaaatttcagattggagtgatgaaatgaacgatatttttaaggatatgcaggcaaacgtcggctgtgaatacatttccgacctgccctcttacaagcgtaaggtgtggcatgaaatgaaacgactgaaccctgccgactatgaagaaagacagttagaagatttttcaaagtatgtgtttggtatgtcgtaccagaccttaaaagatgtgatgaaacaacagaaaggacgtgaggaacaatgcaggaaacaagggtgctggtggaaacgggaagaacaactggcgaagaaacagtatcatactggtttgaactgccgatagacgttgccgagtttgaagaaaagctaggtgtcggtgcagaaagtcaagattaccgtattatcgaaaaggggttgccttttgctgatgaagttcacgaacatacaagcgtgtaccagctcaacgaattcgattttatgtaccgccagctttcaagcgatatgcaggaagaatatacagcacttcttgcggtgtatgaaaatttagaagcactttatatttgcaggaacgtgattacggtttatcccgactgcaaaagcatgatagatgttgcaaggcaaaagctgatgaatgacccgacgttcaaacatttatccgaggactgtcaagaatactattttgactttgaagcctatgcttctcacttgcaggaacacgggaaatttttagtaacggaacacggtatctttgaactgtcagagtaggaaatgaggtggtgcttatgattgatgatatggcggtttacattgctaatcttggcaaatacaatgagggctatttagtcggtgcttggttcacgttccccattgacgaggaagatgtaaaagaaaaaatcggcttaaatgaacagtatgaggaatacgcaatccatgataccgacaacttcccgattgcgattggcgagtatgtttccattgaagaactcaatgatatgtatgaaatgatagaggaacttcccgactatatcgtagagtgtctggacgaatttatcagccactttgggacgctggaagaagtcgtggaacacaaggacgatatttattattatcccgactgtgaaaccatgacagatgttgcctactactacatagacgaattgcaggcactaggggatattccacccagcttgcagaactacattgactatgaagcctacgggcgagatttggatatgggcggttgcttcattgaaacaagccgaggtatgtgcgagataccatactaacgctggaagatcagcgacaagcattgttgctactgacagcatatttctcttttaagggacagtctgaaaatggctgtccttttccatttagaaatttacgaaaggagctgaaagaacttgaaaaagattaaaagctacacgggtatctggaacgtggaaaaagtcttgtatgcaatcaatgactttaacttaccctttcccgttacttttacacagattacatggtttgtgattacggaatttatcatcattctgtttggggatattcccccactttccatgattgagggagcatttctcaaatactttggtattcccgttgctctcacttggtttatgtcgcaaaagacctttgacggaaagaagccgtacagctttttgaaatcacagataacctatgcgataagaccgaaaatcacttatgcaggaaaagccgtaaaactgcataagcagatattgaatgaaacaatcacggcagtaaggagtgtgaattatgttcccgataaaatatattgacaataaccttgtctggaacaaggacaatgaggtgtttgcttactatgaattgataccgtacaactattctttcttatccgcagagcagaaatttatcgtgcatgacagtttccgacagcttatcgcacagtcccgtgagggtaaaattcatgccttgcagatagcgacggaaagctcaatccgcagtatgcaggaacagtcaaagaaactggtaacgggaaaattaaaggaagttgcctgccagaagatagacgaacagaccgaagcgttagtatctatgattggggacaatcaagtggactaccgcttttttcttggctttaagctcatggttacggaagaacagctcaatctgaagaacatcaaaaaatcggcgtggctgacgctcacggaatttctccatgaagtgaaccacacgctgatgaatgactttgtttccatgccgaatgatgaaatcaaccgctacatgaaaatggaaaagttactggaaaataaaatctcacgtcgtttcaaggtgcgtcgcttggaaatcgacgattttgggtatctcatggaacatctttacggcagggacggtatcgcctatgaagattatgagtaccagttaccaaagaagaaattgaagaaagaaacgctgataaaatactacgaccttatccgtccgacaagatgtgtgattgaagaaagccagcggtatttacgcttggaacatgaggacaaggaaagctatgtgtcctattttaccgtcaatgcgattgtaggcgagcttgattttccgtcaagtgaaatcttctatttccagcaacagcaattcacattcccagttgatacgagtatgaatgtagaaatcgtggagaaccgtaaagcattaacaaccgtccgcaacaagaaaaaggaattgaaagaccttgacaatcacgcttatcaagcaggaagtgaaacaagctcaaatgtggtggacgcattagacagcgtggacgagctggaaacggacttagaccagagcaaagaaagtatgtataagttaagctacgtgatacgggtgtctgcacccgatcttgacgagctgaaacgccgttgtgatgaagtcaaggacttttacgacgacctcaatgtaaagctggtgcgtcctgctggggatatgctggggcttcattctgaatttcttcctgccagcaagcgatatatcaatgactatgtgcagtatgtaaaatcagacttcttggcagggcttggctttggtgcgacccagcagttaggggaaactacgggtatctatataggctattccgttgatacgggaagaaatgtgtacctgcaaccgtcccttgccagtcaaggtataaaaggtacagttaccaacgcccttgcgtctgcttttgtcggttcgcttggcggtgggaagtcgttctgcaacaatcttctggtgtattattcggttctttttgggggacaagcggttatcttagacccaaaatcagagcgtggcaactggaaagaaacacttccagaaatcgcccatgaaatcaatatcgtaaatcttaccagcgacaaggacaatgcaggacttcttgacccgtttgtgattatgaagaatgtaaaagacgctgaaagtctggcaatcgacatcttaacattccttacgggtatttcttcaagggacggagaaaagttccccgtacttcgtaaggcggtgcgttccgttacccagagcgacaaacggggcttgcttcatgtgatagacgagttacgccgtgaagatacgccagtatcaagaaatatcgcagaccatatcgacagcttcacggactacgactttgcacacctgctgttttcagacggtacggtggaaaatgctatcagccttgataaccagctcaatatcattcaagtagcggacttagtattgccagataaggacacgacctttgaggaatacacgaccattgaattattgtcggtgtctatgctgattgtgattagtacctttgctcttgattttatccattcagacagaagcatttttaagattgtcgatttggacgaagcgtgggcgttcttaaacgtggcacaaggcgaaactttatcaaataagctggttcgtgctggacgtgctatgcaggcaggcgtttattttgttacacaatcttctggggacgtgtcaaaagaaagtctgaaaaacaatatcggcttgaagtttgcctttagaagcaccgacatcaacgagataaaacagaccttagagtttttcggtatcgacaaggacgatgagaacaaccagaaacgcttgcgtgatttggaaaacggacaatgcttattgcaggacttatacgggcgtgtcggtgtggtgcagatacacccagtctttgaagaactgctacacgcctttgataccagaccgcccgtacagagaaatgaggtggagtgatgaaagaaaggataaaaggtgcgttcacaaaaaagaagatacttcacgttctcaaaatggctctgtttgtcgtggcactctcccttatcctgctttcacttctggggacggtggctcatgcgacggggcttgtggacgataccataaacgcagaaaatctttactcaaaatatcccctttccaactaccagcttgatttttatgtagataatagctggtcatggcttccgtggaactggctggacgggattggaaaatcagtacagtacgggctttattgcattaccaactttgtctggactatcagtttatatttgagtaatacaacgggctatgtggtgcaggaagcctataaacttgattttattaacgatatggcagacagtatcggaaagagcatacagacccttgcaggcgtaacacagaacggcttttcttccacgggcttttatgtcggtttcctgcttcttattatcttggtggtgggactttatgttgcttatacgggactgataaaacgggaaacaagcaaggcacttcacgctgttatcaactttgtggtggtgttcgtgctgtccgcttcatttattgcctacgctcccgactacatcaaaaagataaatgagttttcaagcgacatcagtaccgcttctttggacttgggaacaaaaatcatgctccccaactctgacagcgagggcaaagacagcgtggacttgatacgggacagcctattttctattcaagtggaacagccgtggctacttctgcaattcggtaacagcaacgcagaggaaatcggaacagaccgtgtcgaagctcttgtatcggcaagcccagaggacgaggacgggaaaaccagagaggaagtcgtgaaaacagaaatcgaggacaacgacaacaacaatctgacgataccgcaggtcgtgaaccgtttaggtatggtgttcttcctactgttcttcaatttagggataacgatatttgtattcttgcttacgggcatgatgttgtttagccagatactttttattatctttgcaatgtttttacctatcagttttctactttctatgataccgagctatgaaagcatggcaaagcaggcaatcgtaagggtgtttaataccataatgacaagggccggaataacgctcattgtaacggtggcgttcagcatttccagtatgttttataacatatccacggactatccgtttttcatggtagctttcttacagatagtgtgtttcgctggtatctacatgaagctgggcgacttaatgagtatgttctctttgaacgctggcgacagtcaaaacatgggacgcaggatattccgcagaccatatctgtttatgcgacatagagctaggcgtatggaaagacggcttgctggtgcggttactgctggcggtgttgctggtgcggtggcaggtagcacgatttcaaacagaaaaccgacaaggaacacagccacaaaagacagtcggggcaatacatctacttccagcatgggacagcgtgcaggctcaaaggtgggggctgtcttagatacgaaaaataaagtgaaagacaaggcaaatgctgtcaaagagaatatcaaggatatgccgacacagaccgcttatgcggtgtattccgcaaaggaaaaggcaaagtccagcgtgtccgactttaagcgtggcatggtgcaggaacagctgtccagacaaacgggacgcttggaaaggcaagaacagcataggcagaatatcgctgacaagcgtatggagcttcaaaaggcacaagaagcaaggcaggcacagcgaaaggctgacggatcagcgacaacgggagctacccgtccccatgagcgaccagccacagcttcaaccattccaaagccgagtgcagaaaaaatgcaggaagtcaaacgtcctgccacagcaaccacttctaaagcaagtgagccagtcaagacaactgttatcaaagagcgtccgttatcttctggtgcttctgataggaaagcgacccagtcggcacagatagcacataggcagaatgtagaaaaagtggtatcgcaggaaacacgccagaattacaccaaagaccgcaggacaaaggttcagcagacccagagcgtccagaagaaccagcagaccacagagaaaacccgtaaccttgtaacgaagaaaggacagaagaaaaaatgaaactgaaacatatcgctcttatcggcagtctgtttcctctcctcttttctctggtgcttttctttggtgtcctcattagtgcggacagcgacgacgagaacagcaatttttcttctggcattacgggtatgaacttatcagcagaagtcttgaaacatcagcctatggtggaaaaatatgccaaagaatacggtatttccgagtatgtcaatgtattgctggctatcattcaagtagaaagtggcggtacggcagaagatgttatgcagagttcggaaagtcttggtttaccgcctaattccttagatacagaaagttcaatcaagcaggggtgtaagtattttgcgtccctgctttcttcctgcaaaaatcaaggtatcgacgatttgaatgtagcgatacagtcctataactatggcggtggctatgtgggctatgtggcaggtaaaggaaagaaacatacatacaatcttgcagagattttcgcccgtgagaaatcgggtggaaagaaagtaacctacaccaacccgatagccgttgcgaagaacgggggctggcggtatggctatggaaatatgttctacgtcgaattagtcaatcagtatttaactgttccgcaggtatcgggagagctggcacaaaaggtaatgaatgaagcgttaaaatatcaaggctggaaatatgtgtatggcggtagcaatcccaacacttcttttgactgtagcggacttgttcaatggtgctatggaaaagctggtatctctttaccgagaacagcacaagcacagtatgacgctacccaacatcttcctctttcgcaggcaaaggctggggacttggtgtttttccattctacctataacgctggtacttatgtaacgcacgttgcaatttatgtagggaataaccagatatatcatgcaggcgacccgataggatatgcagacctaagcagtagttactggcaacagcacttaatcggtgcaggacgagtaaaacaatagaaaggacttgaaaatatgtttaagaagaataagaaacagacagaaaatgtcaaagaaaaaatggtgcgtactgtcaaagtaggcacacataagaaaaccgtgattgcgttgtgggtggtgcttatcgcaagcgtgagctttggggtgtataagaattttaccgctatcgaccagcacaccacccatgaaaaagaaatcattgagcttcgcttgcaggacaccaacgggatagaaaatttcgtaaagaactttgcgaagtcctattacacatggagtaacagcaaagaagtgattgaagcaaggacgcaggcaatcagcggttatctgacaaaggaattgcaggacttgaatgtggatacaatcagaatggatataccgaccagctccacggttacagatgtgattgtgtggagtatcgaacagtcgggaacggacactttttctgccacctacgaagtagatcagcagataaaagacggagaacagacaagcaatgtcaaggcaacttataccgtgaaagtccatgtagacgctgacgggaatatggtaatcgtgcagaaccctacccttgcaccagcaatcgaaaaatcagactatgagcctaaaacaccagaaaccgacgcaagcgtggacgctgatactgtcaatgacgctgccgcatttctggaaacattctttaagctgtacccgacagccacagaaaaagaacttgcctactatgtatcgggaaatgtgcttgaacctatcggcagggactacctttattctgaactggtaaaccctatctttacaaaggacgggggcaatgtgaaagtcaaagtatccgtgaaattcctcgataatcagacaaaggcaacgcaggtatcacagtatgagcttgtgctacataaggatagtaactggaagattgtaggataatcaagagagttcatttattgatttattttttcttatgcggtatatttgaaaggaaatataccgcatttggtgtaacagaaaatttaatttaggagtgatattttgataggacttaaaaaacgagatataaaaaaagcattgaaagcaggtgcaaatgctagcggtgtgtctttagctgatatacgggctgatattgaagcgacgattgatgaagctatgaacagtacagacccagaggtgcaggcaaatttcaaaaagtattttgggaataaacgtcctacgccagaagaatatatttacaagattacgaaaaaaacaaaagttaagctgtaaataaaaacgccgtggtaaacaactcacagcgagaaatctgattatcacggcttacaatcagttttggagtaaataattttcgccccagttacaaagttcatcaagaattggtgttaaggtttttccaaattcagttaaggaatactctgtttttggtgggacgacaggataaaccttacggttaatcaatccgtctttttccagttcacgaagctgttgtgctaacattttgtctgttgcttttggaatgagcttatgaatttcactataccgtaatgttttattcattaagtgccataaaatgaccgctttatattttccgccgattagttgaatggttgcttcaacgggacaactaaaaccacaacaattattttccatgatgttctctcactttctttttaggtagtatattacaaaatagtgcgttcttgtccaatagactattacggatataattatagtataggttgacctaattcacaagaacaaaggagattaaaaaaatgaatgtattagatattgcaaaaaagagatattccgttagaacatacgaagataagcccgtagaaaaagaaaagctggataaaatacttgcttctgctcatgttgcaccaactgcggcgaacttacagccagttaaattgttggtggtgcaggacaaagaacgattgaaaagcattgcaaaagctggaaatatatataatgctccattggcaattattgtttgtgcagaccattcaaaagcgtggaaacgaccttttgataacaaacagacaacagatattgacgctactattttgacagaccacatgatgttgcaggcaacagagttgggattaggtacagtttgggtatgcttttttaaaccaaatgtaatcaaacgagaatttcaattaccagataatttagaaccagtcaatatattagtcattggttatgggaaagaaacaccagcagacccagaacgtcattttgctacacgtattcctatggaagaattggtttcttacgactatttataaaaggtttgtaattgtaattttttagacaatgaaagtaacgggtcgtgaaaatgcttcacagaattgtgatctgcattatcacggctcttttactctctgtttactttcaaaactgtaagtgtaattgaatactgcccttgctataatttaatcgtattccaaaacaaataaatgtggcaggaagaaaggagcgattttaatggaacacattttaaatttagaacaagtaaaaaaatactacgggggtaactctggaaatatcacaaaggcagtagacggtatttctatgtatgtagacaagggcgaatttgtcgcaataatgggagctagtggttctggaaagactaccctattaaactgtatctctacgattgataccgtaaccagcggacacattacagtcaacaatcaagatattaccaaaatcaaagataaagattttgctgatttcagacgtgaaaatctagggttcatttttcaagatttcaaccttttagataccttaacgattgaagaaaacatttctttgtcattggtaatcaacaaacagaaccctgctgatattgacaaacgagttcatgctatcgctgataaattgggtattcgtgatattttatcgaaatttccttatgaagtttctggcggacaaaaacagcgttgtgcttgtgcaagagccttaatcaatgaaccgaaactgatattagctgatgaaccgacgggagctttggactcaaaatcttccagattgttactggaaacaatgtctgacatcaacaagaaaatgcaggctactattttaatggtaacacatgacccgtttagtgcgtctttttgtaaacgtattttgttcttgaaagacggtaaaatattcaatgaaattttcagaggggaaaaaagcagaaaagatttcttcaatgaaatactggatatattaaccttgctcggaggtgaagtgggaaatgttaggtaaattagcggttagaaatacaaaaagaagcattaaagattatttgatttatttgataactgttactatcgcattttctcttatatttgcttttaacttagtggcaagttctgaagaagtaatagaattatcgacaggcatggatacgtttaagtatattctagcttttgtgaatgttgttattatatttgttatctgttttttgattaactacaccacaaaatttatgtttgaaaagcgaagcaaagagcttggaacatatatgcttcttggaattagaaaaaaagaaattgctcgattgcttgtaattgaaaatgtgttattagcgatatgtgctttggttttggctattcctcttgggttcatatttagtcaatttgtatcattggtaattgtaaacttattaggtattccagaagtaatctttatttcaataaattttgtttccataggattgcttgctatttactttttggcaatatacgtattggttctgcttaatcttttacgaagaattagaaaaatgacggtacatgattttctttattttgataagcagaatgaaaagaaaatgttccgtagcaataaaaagagaaatattattttcattgttagtgttatattaggaattactgctattttgctttgggcttcacgttggacaatggaaaacagcggtaaacaagaaactcttacgtatttgatgattagcatgatgatgttgattatcagtatttatggtgtatcagctacttgtgcagatatgttgttgtcggttttattgaaaaataaaaaacttaaatatcaaaaagataacctttttgtaacaagaacttttgcgtcaaaagcaagaacaatgagttttacgttcgggacactttccatgttgatattactttctttgttatgtttaaatttttcaagtatcaataaaggagtgtataaagcaagcatagaaatgacagctccgtttgatgttcatgtgtttgaagaaaaacaaccatttaaagattttaaagaatatgtgaatgttgttgatgaagattatacaataaataaagcaatcgaatttgatgtttataaagaaccgaaacatcaaatgcagaattattttgacgtgcaattttatgattatgacccagtaatgaaattaagtgattataacgaaatactgaaattaaagaatatggacaccatagaattaagtaatgacgagtattttcttgtaactagcaaagatttgttatataaagttgaaaacaacaaggatattgaaaaaattcagttgacaagtggaaaagaattaaaactaaagggcattgatacaaaaacgtattggtatcaaataaataatactggaagatttgctgttattgtgcctgatgaatatgttcaaggcttggaagtatctgagcaacatctgattatagataccatagaagaaacagatacaaaacttagagaaaaaatcaaacaagatttgaaacatcgattagtaatagtaaatgatgatggtgaaacagtcgtacaatattatagactttctgtaagaggttctgctattgaagaacaaaatacgatgaccgctatgattgcaagcatttgtctttatattgcctttattttgatttcggcagttggaacagttcttgctattcaatcactaagtgactctacaaagtacaaataccgctatcaaacattaaaaagattgggagtgaatgataaatcattatttaaaacaatcagaaagcaattactaatattatttggtgttccagttatttattcaattcttgcaagtttctttatgctggtatcagtcaataatgtttataaaatttatttagaaagtgagtatagttatttaatttacttcgtagtaggtttggcgattttcttctttatctatggaatttattggatagcaacgtatatcggtttcaaacgaaatatcaatgaggagagttagatttttctagctctcctgctgtggaattattataatggtaaatcaagggggtgtggaaatgagaatagcaattatcgaagatgatgaaatcactcgtctggagctttctaaactattgaacacacaaggatatgaaacagtcttgttgactaactttgaaaatctgacagaggaattaaagcaatattgcgtagagctggttttgcttgatattaacctgccgtatgaaaatggctatgaagtatgcaggaaaataaaacaagctatgccagtacctattatctttgtaacaagcagagatacaaatgctgacgaattgaaaagtattcaagtgggtggaattgactttatcacaaagccgtatgacacgcttattcttcttgagaagatcaagcgtgcattgcagttatcaaacccgaacaatttccgtgagcttgtcaaaaaagattgtacccttgatttacatttatccattttgaagtatcaagagaaaagcattgaactgacaagaaatgaatttcgtatcttatactacttctttatgaacgaagataaagttatcagtaaggaagaactattggaaaagctgtggaacgacaaatattatttagacgaaaatgtattactggttaatatgacccgtctaaaaaagaaaatgaaagaaatcggtattgttcatttattggaaaatatacgaggaaagggttggaaactgtgagcttttttacattcttagaagaaaaaataacagagatattgtttcagcttttctttcttgccttagtagcatttctcttgattttctacggtgtagatacgctatttgttgtattgctggtaattctgttcatcagcatacaagggctttttcaatggtgtttgtatcggaagaaacgtaaggcttcgcaacatattattgatttagtagacggattggaagaaacctactatattgcagatgttttaccaaagccaaaagaatttcaaaatgaagcctattactacgcactaaaaaaagcctgcaaatctatgaatgatgaaatcggtaaaatcacagaggaaaagcaggattatcaagaatatgtggaaagtttcgcccatgaaattaaaataccgataggagcattgtctttgacgttcgataatacgaaaaattacacgttaaaaaaagaaacagacaagatatttcagttggtggaacaaatgctctactatgcaaggagtgaaaatacggaaaaggactattttgtaaaacagttgcagttagacgaagtgatacataatgtcattctgaaatttcgtcattcacttatggaaaggaaagtaattatcaatatccatgacatagagaatgttgtatatactgatgaaaaatggctgacattcattctatctcaaatcgtgcaaaatgcgattaagtattttgacaagcaggaaaacaaactgacgatatacagtcaagacaacggaacaaatatactgcttgtgatagaagataatggctgtggaataaaaacgtctgatttatcccgtgtatttgaaaaaggctttactggttctaacagaaacaaggcaaatgcaacgggcatgggactgtatttatcgaaaaaattatctgatagactaggtttgaaattggatattacttctaaagaaacggaatatacaagactgacaattacattcccaaaaggaacagtccataatttacattaagcattgaatagttgcttattgatgataaaacaaaggaagtgatacacatggagttatatcttaatgatgtttacccttatgcacaacaaatatcaaattatatagaacgagaaatttttcaacagaaattaaaagcaggtcaaaagctactttcaataacaaatttaagtaaagaattaaatgttagtaaacatacaattcaattatcttataaaatactgagaaagaaagagttaatcgtaaaaaaaggaaatgatttttttgttacaaaagataactgctgtataataacaaaaatgaaagaagaaacagatttacagataatcaaatgtctgcatgaattagcagaaatgggatattcaagagaacaaacaaaatccttgattttaagaaaattagaaactttaaaatttcctcaataagttcgattaggcattgcatagtattttgctgtaagggggcttgagttatggaatgttttaagtgcaattctttacaatttaattccacctaacagtacactattaaaaaataaatattatttagctttaaaagctcgtacagactatatgttttgtgcgggcttttttcatacccgaaaaaaacttaaaaatttttcaaaagaggtcattaaatcacacctagctgtccttatatggtgcggaaagagggataaacacttttcaaatcataaaggaaaggaggtgagattgatgaaaccgtctgacttccagaaaacagttcaatgtcgttttgaaagttgtttaaagaaagttgttcgtagtgtcgtgaaagattattacaaggaattaaaccgtcgtaaaaataaagaaatatctttcagcgaattgccagatgtcattgttgataaaatgactgtttgggacgactacgaaacagattatacaatcttttcagtatgtggcattgatattcgtgtccttgatgatgaattggcagaagcattgaagaaacttccagaaagaaaacgcaatactctgttgatgtattactttttggaaatgacagaaagtgaaattgccaacttgcagaaaatcacgcaaagcggtgtatttagaaatcgacatcacgctttggaaattatgaaaaaaatactcaaggaggaacattagaaaatgaaacagttatttaaaaagccgtcctattacttgatttcatcagctatggacggaaacgaaaaagcgattgagaaattgctggcattttatgacccgtacatatcaaagtgctgtttacgttcactttatgacgaatatggcaatgtttatattgttgtagacatggaattaaaaggacgtatcagagaagcacttatcaaaatgattttaggttttgatattgaagatatggacttagaaccagaagaataagcagtttttagcggagcatgatttaatatccccccctctttcctgctctgccacctgcttttatatgaaagcaacacgctttcgccacagctctttgacaactgaataaagcagacagatacgtttgtgagatggcgagccacggggactgtacgccacgaccttttcaaaagaaagcgagcgacccacgcagtgatccgagagcgactgttggaaaagttgttttgccacgacctatcctcacagaataatgatacgtccgcatggtgcggttctgcccacaagaatgggaatagttgagatactaatggagctttccaaagccgtctgcctgcttgtaaaaaacgacacacagtaaagggggtgcatagattatgaacaatactgatgtgcctatttgggaaaaatatacgctgacggttgaagaagcgtccaaatacttccgcattggcgaaaagaaattgcgtaaattagccgaagaaaatcttgacgctggctgggttatcgtgaacggcaaccgtattcagattaagcgaaaacaatttgaaaaaatcatagatacattggacgaaatctaatgtcattgagccgtagatatggtataataagatatagcgtatcacggctcattccatgacggaaaggagctttacactatgtctaatgtgaaacgaaaagacagtaaaaatcgcaatttgcgtaatggagagagccagcgaaaagacggaagatacgtttataaatataccgatatatacggaaagccacaatttatctattcttggaaacttgtaccgacagacaagacacctgctggaaagcgtgatgatatatcgttgagggaaaaagaagcacagataaaaaaagaccttaacgacggtatcgacacagtcggtggtaaaatgacagtctgccagctttatgacaagaagaacagccaaagaaagaacatcaagagggctactgaaaaaggacgacagtatcttatgaacgctctgaaaaatgacccgttgggtatgagggcgattgatactgttaagcagtcggacgctaaagaatgggctatcagaatgagcgaaaaaggatatgcctataaaacgattgataactacaagcgttccttgaaagcgtcattttacatggcgatacaagacgactgtatcagaaagaacccgtttgaatttaagctaagtgatgttctggaagatgatacggagcagaaagttatccttacaccagagcaggaagaacgcctgcttgcctttatggaaaaggacaagatttacagcaagtattatgatgaggttgtgcttctgctggaaacgggacttcgtatttctgaattttgcggattgacgacgcatattgatatgcagaatagaatactcaatatagaccaccagttattgaaagatagcgaaatgggctactatattgaaacgccaaagaccaaaaatggaaaacgggaacttccattgacagaacgtgcttatcaagcaatccaaagaatactaaagaacagaggaaaagcacaaccgctgattgtaggtggttacagcaatttcctattcttgaaccgtgagggcttacctaaagttgcaggaaactatgagggcatggtgcgaggactgattaagaagtataacaagtatcacacagacaagttaccgaacatcacaccacattcattccgacatacttattgtacgaatatggcaaacagaggaatgaacccaaacaccctgcaatatctcatgggacacgctaacataaccatgacacttggctattacgcacacggtacatttcaatctgcaaaagcagagctggaaagactggcttgttaatatcggagcttatatttactactcatttactacttttggttgcattttcatgctggtaaatgccagcttatgcaaggtatcttccaaaaagaaaataccgataaagctctaaaatacgggatatatcggcatttaccaacttatgaaaagataatcagaaatttagtaagtttttggggtaaaatccggattttccactgtgtccgtgtggtttttaggaattttgttatcaatcaaaaagtcttgtgatatcctgatatcggttgattatacgataaatctctacgtactcgttaccaatcttgtagagaatcacatattcttcccatatcgcatatttatagtctgtccgaaagctgactcgtttggagagattcgatcccattttcggaaacatctgaagattctcaaatttaccataaagctcttttatagtcttcgtagcatattcttcgttatcttcggcaatataatccctgatattcttcagatctcttacaacaatcggattaatccgcagttttaacatttcattcccccatcagtaccttcaattcatctagattcaaccaaccatctccatctttcactgcttcttcagcttcctgtaacttcatcagaagctttttctctgctcgatcacgttcataatcttcaatatccatgactacaaaacgtcctctgccattcttagtcaaatataccggctctcctttatgacagtttttcaggacttcattataatttctcaaatcagatactggtaaaatatttgccatattctttcaactccttcctttgattttaaattgtttctgatacttctattatacacaataagctgtaaaattcaacgtagatttttacagcttttgtctcatggttgatagggctttctttttcaattgaataaatccagaaactttccccctggttttatcatggtcttacacactttcctgccattgatttcatcaaaaacagaaaaaccccagaaaccttacggtttccggggtatcttatatttgaacataatgtcatcttgcgataacaaatctatattcagattgtattactcgatgattgtagcaacctttccagatcctactgtacgtccaccttcacgatatcagaccggtgtattgcagtgtgcaaatggtgacttttcatgtgatttgtggggaaaaatctgaattttccattgtgtccgtgtagtttttggagattttgttatcatggtgttatcactccctttgtctgggcttccaaataatcttcatataatcccatataatttataataacctttccgcttgcttgtgctaatttaggaggaaccgcatttcctatttgcaaactcatttcgcccatgtttccctgaaattcaaatttgtcatcaaaagattgtagtcttgctgcttcacgtatagacaatcctctattttgtgtcgggtgacaataacgcccttttgaaataattgtacagccagaagtaattgtaggtgctggcttgtctggatctataattccgtatgtgtctgtgtacgatacattttcctttttatgacattcaagttgtaattcttccgaaatcatttcacgatttcctccatgaagtcggatttcttgcaaccgttcaatatttgtttccgataaactacgtgctttatgattttttattataccatcatcataactttccccagcccctagtattggcaaatcaaatattgcttttcgaacagttacccattttctataccctttctttttttctttagaatgagttgacttcggtaatattttttgtttttctttatctaatcctaaattatcatatacatcattacgtattccatgcaacactaatcgttttcgtatttgtggcacaccaaaatccgcagcatttaacgtagcatactcaacatgataattttcttctagttcttttactacatttttaaatatttctttaccaaccccagtagacattcctggaacattctccattaaaataaaggaaggttccaattcatttattattctaatatattcatatactaattcattcttttcatcatttgcatctctttttcctaaacttgaaaaaccctgacatggcggacagcccgcaagtaaaaaattatcacgtctgtttattccagttaattcagttattttttctccagttactttttttatatcttctttcaatactttagtgcgtttcaaattacatttatatgttttcaaagctttttcatcaatatctacacccaagcataatctgaatccacttttcttcaatcctgtcgataatccacccgctccacaaaacagatcaatcgctttgaatttcataaatgttaccacctctatacttatttcttatatatttcatttacaatttcttccactcttttcttatttgagctatcttccatgctccatttatatgccaacttttgtataagatcatttatatgctcttcgtttccataatctgcttctgaaatggtcgcaaatatctttttcgcattgtcattcgtaatatctactttttcgttcactatacttggatattgctgctttacatattgagattccagtaaaattttttctggtatagatttacttggcaagtaaaacacactatctgtataatatttaaggtactctttatatgcatcaatctcctgatcttctcgtttcccaccatttccaccatcaacatatgcttgaatatccactccgtatgcttttttcacacattctttcatatatgaaacatccttttcttgtttcacagtcaattcatctgcattataaacgtaatccgtttgcatatcaccatctaatactaaaaatactctttctttaaagaaatcatgtgtaacaaatgttggtaaatattttgtaagtaatgttttttcaccacccggattaaattccacatcaaaatattgagttttatccattcttttcaatacttgctctacaatattttttgctgcaaaatcttcacaaaatattattttcttatcagatacacaatcttccaaatcataaaatgcttctctgtaatcaacattttcttttacttcaaatcttccctgcgaatttgtaatatacaatttaatcgcttctgatggcatatctctaatcaatataggcgaatgcgaagatataactacctgtaatttttttctctttgttacttctagtaaatactctttgtgttagtgatttcatgagctgtcaccagattgctcacatcagttgacgctcacttgcttaactttctgtcaccagtcagttaggcaataccgcctgtttccaggcggtacctgctttatgaagttaccatcccaagcatctcgtgttccacaacgaacttgatcatataatcatcgatcaatcgtttctgattttgaaacgcatacatcaaagctttttcacagacacggttgatcatccgtgggattcctgcagatgccttatggatctcatccaatgccttggttgtaaatatttcctgcccgcatccggagtaatccatgtggcttgcgatatattgttctgtttcagaacggtcaagatgaggcagcgtacagtacatgtcaatgcgctgccggatggcggcataccgctgtagctttagtttattttcccacagttctgtctgcccaactaaaacaagcgccatgggactcatggaatcaaaccggtaattgagcaaaaagcggaattcttccagcgtctccttctctaacaggtgggcttcatccaggatgcagacaacttttttacgctgtacgccccggattacctcgatctcctgttgcagctgacgctttgaatcaccgcggtagaaacgggattccagccccaactgatccagcaaacctttatagaaccaccttggggtcagttttgagtctgacagataaaggatgatgtaatcctcttttggaagttccgaataaaaccggcggataagcgttgactttccacaccctgaatcagctgttacaacagcaaacatctggcggtccgccacataagccagacgaccgagagtttcccggaaagcattggattcaaacagtttttcgggagggacgtcccggacaaagggggtatgttccatgccaaagaatgattcatacattagccattcacctccttcctgtaggaagcaaatgaaatcgcatctgccatttggcgcctgctctgggtatgcttcgtttccaaagcatccagaaaacgggaagttgtcggtttttgttcctgcatagcagctgggagcgtagcgtgtctatcgcaatacgccccaatctttacaggcattgcctgaaaaggttcaaatccgggatgagaaatggtgatgatctcaggatttgccggatcataggagatttctaccgtatacccgatcaaggccggcttggtttcatacctttgcccgcggaaactgatacaggcacctttatccactttcctctgctcatgatgcaggaaagcttcggctacaacggctgtatccaaaaaagtcagtgggcggctgtcccggttccattcctgaagcggtgagatcccttcttccggaacggcagcgccaaggctttcatagtattctgcgatgccatcatgctttttcttgtggtaatactcatccagatagatggcccataggcggttcagttcctccagtgttttgatgtttttcagctttgattcccggataaaagcatctactacctgatggaacttctcgatcttccctttgcttttaccggatcttggttttgcatacatcacacggatgcccaaccttgcaagggaagaccggatctgttttgcgatatactgtgtcccattatcaaagtaacaggcatcgaaggttccataccgggaaaccgcctgatggaacgtatcttcaatgattgcttcttcctgattatcatagaaccgggaagataaaaggtatctggagtggtcatcgattgccgaggacaggtaagtctgtaccttggctccatttcttccaatcggaagcttgggaccatacttgatatccgcctggatcagcatcatgcggtgtggtttgcagaaacgtttggaagaactgttccttgcatcctggtacatctgcatctgcttttggccgtaaccggccttgtagatatggcgttccaaagtagaacgctttaaagcaccgggtgctgcaagcccttccgtttccaggatgtagatgatctgggcaaccgaccgctcgggaacctccttgcgtagctggattgcctgctccaacagaaactcaaagttttcagggagtttttgtgagcggtgtttctcccggtcagccggctttagccctgtaaactgcctttccgaaaacgctttttcataacggtaaagggaacggaccgatatatgattctcctctgcaatctttttgcgcagctggatccgttttgcatcatccagatcagcctggagaagcggagaaatcaattggaaacgcctgagggcttcttcttcctgccattgttgtttgtttattcttgtattcataaaatagtgacctccttttgagaccactatacccgttggtaccgcgacagacgatgcaaagtaggtgcataagccttaccagcagatcgggactaaaaatcccccgctgttgtaaatctgacgcaagatgatttctaaccagttttgatattggtttctgaaagaatcgagcagtgaaccaagggaaatcctctcttcgttataacccagcaggaactccctgatcgtccttaaatatccgttgatacgttcaagattttcgcagaaccattgcagccagcggagcatggtagcgcaggacgggtagtcttcagaatctaagtcttccggctgtacaacgccatccagcaccccggagatcacttctgtttcgtaatgcttgtacggaacaagacaatccggaagttcattatgataagagtggcagttcttacaataaaaccgccgaatgatcaactgatcttttaaaccgccttcctttctacggatgcgtgggcgtgaatcccggtaacgaagcgtagcctgacagatggggcacatatgggtggtcacactgctctcaacaaaaaacaccaaaatcctccttgaggacaagtgaataatctgatataataaccatggtttagtgaccagggtctcagagtacacaacttgctaggagggtgctctgagaccttttcctttttgtatgctgatgacagtatacaggtcaattcagagacaggcaagtaaatcagtattttgataatttatgaggtcaacaacatctttgagtttttcctgtgctcccggatgaattgagacttctggctcatccaaaagaatcaaactatattcttgtgcttcttcaatcttttttaccaactgaattacagcaacttctccacttccagcattagcttccgaatatcttgatgatagttttgtttttacataaattgatgtacctggatttttaaacaatgaatgttcagcaactttaatactcacatactctttgcccagaatagaactgattttctttttcatttcatcattgagttctttaacaacacctactttttcatctggagcccctgggaaacgcattgcttctccattaaacaacctattcaaatacttcgaacgttttctcagcaaatcctttttacccgaaatgtctccttttgcaaaatggaatattttatcaaatgcacttacttctgctctaaaatctaaatatacaacttccttctttacaggatcgtttcttgtctgtgcagtcatcccatccttttttattggttttgaggtttcccaataatcgggatcttcttcttttgttttagagcctcttctcattcgagttttcattacttcttttatttctgattgtttatcttcccgatagccatagaaaaatctattttttccctctccaccagtttcttctataggatctacttctgtagaaaaccagaaatctgcacatgatttccaataaggcgcaccatataaagcatgtaaagttgaactttttccagatccattcttccctaccaatattgttattggaaattccagattaatttttgttcctggaactaaattcttataataagggaatactatgtactcaatatacttcttaaatgcaccgttttctttcatattttttatagtatcaatttctttgtccatattttttcctttgtatattatctattttcatttttcaattctattttaaccgtttcacatattcataaatccgtttcagcattccgtctttatcttctcctaattctccacggattttatcaccaaatcccatatatgtattgaatccaagcatatatacagccattgccatagacagctcgtcgttttcatcaccatataatgatgccacttttctcaattcatcaataaccgtatcatgtggtacttcaacaccgccttcttcatttacaacagaattgattatctccggcaatgccatacacatcttataaaatgcatcttcttcaccagtgagaattgcataaaactgatccatactcacacggcgaatcaatctatgctgtacatttttcccatcaacttttgttgaccattttatattctgtgatttctttgcaattgcttcaaccaacagacacgcacaatcatcatcttccaaaatctgtccctgcatctttatatatgtttttgcagaagatgcagaattcatagtattgtgtttgtttttcatttccacatatattgtatgtacaatatctccatctggcatttgtattccatcgggatttctgtaaataacatcccagcctgcctgcgggacttcgcagcctttgaaataggaaaaaatattctggtgaaaatatcctatatcattattattagacttatctctctgccggaaaatttcattatttacaatttcttcccagcttgtacgatacaccgatttatcgaaaatcagcttgatcggatcaatcaggttactattgaaccgcttcaaatcatacgattccagtttttctccatatttcataatcgttgcacgcacatgcttcttaaactcttcttctgatataaaatctaaattccacgccatttattttaccccctctaatgatttatgtatctctaacccaatttcatatgctaaattgacaggaacagcatttccaacctgtttatactgagattgaacacttccacaaaattgccattcatctggaaatgtttgacatcttgcattctcacgtaccgtaaacggtcttgcttccaatggatgacatctttctgtttgcttctgagacggtgaagtcaataccgtcaatgacggttcatccaggctcattctcctaagaattcctgttcttccaccttccatatcccagcaacttttcatatatgcttttgcaatctctggatcaatatctctccaatatcctccgggtggaactaattcaaatattttccttttattttctccgtatggtactcctggtccttctggacaatccaataaaacatctctcaaaacaggcttataatcatgttctttaggaaatgaaaatgaaacttttcccactaaatcatttctaattccaacagtgattagtctctctcttttctgtggcacaccaaaatcccacgcatttaaaacctttttctgaatggtatatcccgcctgttcaaaaatatttgttatcgttgcatatgttcttcccttatcatgagttagcaacccccgcacattttcaaacaaaaacatctttggctgtaatttttgtaaaaaagttgcatagtgataaaaaagtgttcctcttgcatcttcaagtcctaatctttttccagcataagaaaaagcctgacacggtgcccctcctgataataaatccagttctcctttttttataccaaaataatcttccaaatctaagcaagatatattagctatatcatcatgaataactctccagttcggtctattggttttcaaagattctgcagcatctttatcaaactctattagtcccaatggttcaaatccagctttttcgattcccaaagccagacctcctgctccagcaaacagttctatggttgtaaatgcatcaatatcgatttgtggtgattcttctttttttatctctacaacatcttctatcttgcaatttaatgtaaaacatattttttctattgattcaaatgaaactggctcattctttcctaatcgagctaatacattaaaacttattcctgacgcttccttcaattctgtgcggttcatttttttatctatcagtaatttccataatttgtcataacaaatcgccattaaaattcctccaaaatcaaaaatagtacaactcatattttaccatataccacaattagcaacaagcaattttctcactatatcgttagatttcctcttgtatgtttcttaacccctttgctatttcttctgttttttgataatatattcttatcagttcaggtagaaagaaggtacctatatgtcacgtgattccgctactgtttcaaacaatatgcgtaaaatccacagtaaagatacttccatagaactattgctccgaaaagctctatggcacaaaggttatcgctatcgaaaaaattataaagctctccctggttctcctgatattgttcttaccaaatataaaattgctattttttgcgatagtgaattttttcacggaaaggattgggagattctcaaacttcggcttgaaaaggggaaaaatccagacttttggatcaaaaaaatcgagcgaaatcgtaatcgtgattatgaaaatgataaaaagcttctattcctaggctatactgttcttcacttctgggggcaagatatttccaaacatacagatgaatgtttacaagccattgaagaagccatttgggatacaaaattttctgatacaaccactgactatgatatatctgaagaataacccctcctatacatgaggctatccacaactcctgcagacagcctctttcctacataaagattatatttttatgtgctatttcttcagcagttgcttgaatattattcatcctccgcacccattccatctgatcctgcatcttcagttcttctgtcacgccccactgttcagccatctgttccaccagcatctcgactttttctcttgcttctttatcgacctgattcagatgctccgtcagttttccggtcagtaccagatattgatacctggcactcctatgttccttcagaaactgttttcgcattattccatatttcccatatgtaggttcttcctcattgatttccagatccggcagataataatctccatgcaatgtgtagctcagtccgttcttttcatcataaatctgtttcttcatattcttacaactccattcctctgtattttgctttgttcttttttatctgtgcattgtattcttcacttcgttctttcgcccatggtatgcgatcacttatttttttcggcatttgttctttctgctttttcgcttcaagttccgcctgcatccggatatcgtcctgcaccagtcgttctaccatatctttccccaacatgcgtaaaagtcggttatatctgtctgcaattccctgcagaatttctttctcaccggataatttctgataatccttctgaacttctgccagttcctttttagtgttctcgtgctcctgctttttcttctgaaacttacttttccacttatctctttctctggtaagttctttaacctgtgcagccatcgcaccaattttattcttcatttcaatgaacaagggttttattttcttatcccgataagttaccgcacgttccaatgctgtagcttccggcaaaaatgttttgatcattccatattcttttatttccttactgacattatccatcactggttgcaggaattctcttctgtcctccagttttttcaattccgtttctgctttctccgcacgtttttccgctatctctttatctttctggaactgaattttttcttcttccagtagcttaatatctgcccttgcgtccgcaatctgagaagtcagaccttcattctctgctgtcagattttctttttcctgttccagttcatgcacttccttcttacgttctttctttttgaaattgtaaacatccagatgctcttcatgtgtacctttctgctcccattcaattccatgctgcattgcaatttctgccagcacttctttttcatgatttatccactggttcagttctgtatcatgcttatttccaccttgaaatccaagacttttcaatgcctgtttcagtgaaactctggtatccattccttttcccttccagttggtcacataaggaacaaagtcaatatgcagatgcggagtagcttcgtcctgatgcagatagcagctaaatacccgaagtgtcggattccgtttctgaaagtctttcacatattcgcccagtacctttacagccagatttccttctgacgttcccactgccatatcctcacaattaccaatttggaatatcacttcatgaaataacttctcctgtttgccctgtcggattttttcataataatttgcaattttccgatcctttcttttcccgacattatattgttatcgggcacactataacaaactgatcttccacttttcaggcaaaataaaagaggtcttggcataaaggaatctgacgtattttccatcagattgttttatcctgagacctcttgtgttatcatatggttttgtaaccatgaaattaagaaagcagaaacctcccctaccaaagtttagtttctgccttcacctaaacatagctctcgctacattcatacatacctatgataacagttaaaacagaaaactacaaccttatttctcaggatttttacaataaaacaatggattcccttgatctgaaccttatttcatgtacctgtggacactccggctgtctcatccgtcatggctcttataaacgcagcatccagcttgctgacaggatcctatccctttccgttgtccgtgtgtactgcaaaatctgcggacatacccatgcattactactttcatccatggtcccgtattcccagatccccctggctctgcacgtccgtctgattcaggcttatgaacatgaaaccggattccggaacatactggaagaacaatacctcgtggatgaaaacaacctgaaatccatcatccggaactaccgcttacactggaagcagcggctgctctccatgaggcttcacctccccgatatccccagcctgatttcaggatgcttttccctcttttccagacagttcatgcagattaaatcaacctccaataaactttttatcctgccaacataaccttacacgacaggtctggttttatcccttatcctttagaaaaaggaggcagatgaaatctatgaaacaagaaaaacaacaggaaatcgcactaatgcgctatggcgccatcgcaccgatgattgcaggacttgatgaacgttatccaagcaagactgctttttacacagaaatctctgcaaaaggcctgatgggacccgacgggaagctccatcattatgctcccgccaccattgaaaagtggtatctagactatcagaaccatggttttgaaggtctcgtcccgaaagggcggtcagatgccggcatgagtcgcaagcttgatgaagaacttcaggagaggatccggtatttcaagaccaactacccccgcatgtctgcagccgctatttacaggcagctgaaatccgatggctccgtaataaacggacaggtatccgaatccaccgtcagccgttttgtgaaccggcttcagttagaacttcggcagaccccgaacagggatatgcgccgctatgaacgcccccatatcaatgaagtctggtgcggggacagcagcgtcggtccccgccttacagattcggatggcaaaaaacaccgggtctatatcattgccctgattgatgatgccagccgcttcattaccggaattgatgtgttctatcatgataactttatcaacctgatgtcggttatgaaatcagccatagcaaagtatgggcgcccaaaagttttcaactttgacaatggtaaatcttacaaaaacaggcagatggaactccttgccgcaagaatcggtacaacactcagttactgccagccatacactcccaccggaaaagccaagattgaacgctggttccggacgatgaaggatcagtggatggcagcccttgatatgcgggatttccattcactggaagaactaaggggaagtctgtacgcttttgtccaacaatacaaccaatctccccattcttccctccgtggacggtccccacaggaccgtttcttttcggaatcggagcagatccgcagactttctgaggaagacatccgtcaaaatttccttctggagcttgaacgccgggtatctgctgacagtgtaatcgtcatcgaccagattgaatacgaagttgattatcgttttgcacggcagcgtatccgcctgcgctattctccgaatatgaaagaaatcttcattgtggaagctgacgggacgctgacacccatccggcttctcaataaaaccgaaaacgcattgataaaaagagaaaaagtacgcttatgcaaaggagacgaatgattatggattacactgcaagatacggattggagttcaatcctttcctaaagaactcaaaggaagtcctcgtagaaacacaggaatacaaggaggttctgttccgcctgaactacctgcttaccacaaaaggcttcggtctcctgaccggaagcgccggaagaggaaagaccaccgccgtcaggaactgggcttcaggactgaacacttccctttataaagtggtttactccagtctttctaccctgactgtaaatgatttttaccggaatcttgccgctgaacttggagcccagcctgcattccgcaagaccgataacttcaagatcatccaggatgaaatcaaccgtctcgtacttgagaaacgacagacgcctgtcatcatcatagatgaagcgaactatatcggaaacgctgtactcaatgatttaaaaatgctgttcaactttgaaatggattccaaagaccgggctgttgttcttctttccggtctgccacagctcaacagcaccctgcgtctaagcatccacgaacctttccgccagagaattgtcatgaattataacctggaaggcatgacaaaagcagaagggcattcctatgttgctgccaaactgaatggcgccggatgcacacaaacggtattcgaagacaatgcactggaagcaatcctcaatgcagcgaatggaaccccacgtatgatcaacaaactgtgtaatgcaagtctgttggttggaaacagctcaaatttaaatatcataaccgccgatgccgtcatgcaggcgatcaatgactgtgaactgggatagctttagaaaccatcatgtaagataatctacatgatggttttttctcataaaataacgtgcctgaagcgtccaaaaatatatgcttcattccatcgttaggtgctccgaaagacccgttttaatctgacggaaaaggcagcgtttaatttgccgaataacattatatctctcaaccgcatcgtcaaacagttctttataaacttccttcagattctcattcttataacaaatgttcagttgtactctgtccggatctacattttctgctacaaaatcccgtctgttatgagccagtgaaccagctccgatcatgccactgattgttcttttcatcataaattttctcacctcttttctgtttgagtgccagatatggcacataatttttatttacgccaaacatggcgatatttaagaaactttcgccggatacggcggttttgttacttttgtcaaaagtaacgcaaaagcactttcgacagccgtaccgtccatcaaaagtccccttgcgccctgccgggggcataacatccatccggtgaacgtctgctttacaccagccgaagcggatcatagacctatttatccaggtatcgttgcctgcacatattccagatctccacaataaggtgtccccaccagataccattctcttgccagattcatctccattctggtctgtacccattcatcacctaccagcacttccagtccttctccacagtgaaatcctgtatcaatccataagtctgatgataataatccatatcttccattactactgttgtatcctaatcttccctgtttcatcattttctgctcctttccaatttgtaaacggaatttgtaaacggggctcaaaagattttaaaagttaactttttaagtttttccttcaagttccgtttacatcgtttacaataatctttactcaaacggtatctccaactgttccggtacttccataaagccgtctttatctttcttcacagaatcttccatccttttccatgaacgctgtattccatattcctttccgaaccgatgtgtaccatgtggtttccagccttcaattgcattgttcataatattagcaatctctttaccttcccactgtttcatttctccggttcgatgtagcgcttcatcgaacagaattctggtacatacatactcgtcatcgtagtcatcaagaaatgcctgtatgattccggcattggtatcttccggcataaattctttttgcagacgctttgcctcttcctcaatttcctttgtgaatcctaagaacacatttccctgtcgatacaataccattgcctctgcccaggcctgttcgatataggctttgctctctgcctcattgtccagaatatgaacttctgcttttgacatatctgtcatcaccggagcaaatcgtctgtttccggttctgtccagcggaaggaaattcagatcatttgaagtaccacaaaatacacattgtcgtggtctgtcttccgggtgaacttcataaggtactttgtaagtttctttctgtctgctcaaaaacgattttatctgttcaatattctttgctgtgatagttgccttcatttcccccatttcgataatccagtgattctgcagttttctgtaaatattttcatcatccagatgatccagattgtcgctgaaccattcttcttttatcgccagagatttgaaaaacgtagactttccggctccctgacttccaaccaggcacagcataatgtcatattttattcccggttcataaattcttgaaatcgctgccaacatgtgcattttcattactccgattgtgtatttgctcttttctgctcccagaaaatgcggaagcatattttctattcttggaattccgtcccaaaccaggctctccagataatctctgattgggtgatatttattttcattggaaacaatatctattcccgctttgatcacacgctcacttgttatttcataatgctcttccagatacattttcagattgtattcgtctgtatctgtaaccgtaggactgttatttctccgctcccatggcacctcttttacaatgtccattcttccggaaagctcatttcgtttaatcgcttttttcagtaccggatcattttgaagtaccgttacacagtttctgattgtctgctttgttcttcccttatccgtatgctccagcatattattgacatcttctgttgtaagcatttcctcgttcacaatatcttctaattccatcaaggacttctcgctgatattcgttaattctttcttcaattttttcaacctcccttctcttcatcttgaaaaactctacaatctcttctcctgttccaaacatcagcacgtccagatagtcatttatctttctttcatttgccaatgcctccgtaaataattcgtgccactcttcatctggttctggtttgtaaatctctttccagaactgaatccatttcagatatctgatcagcacgtctgttgcatgtttcaaccactgctccagtttttctctgatcatcacaactttaggtttctttgatatcaaagtattcctgctttggtgcgtccttttgtatttgtttctgtcttcgatttttatatccagtccaaaatcttctatcatctttttcgcagcttcatactgtgatattccaaataaccttgctgtaaaatctattgcatcaccacccactccacatgcaaagcaatgatagattttatctgccttcatacttgggtgtcggtctttatgaaacggacaacatgccattccatttccctttactttaatcccgtaatgctccgcagcctgtctcgccgtcacacatccttttacctgttcaaataatgtcacttctacctcctgctcctccgggcaagtctctgatgaacagatattcgggaattgttgtatctttcaattcgtgatatacttaatctgccaagatggtatatcagtgaatctgattatcagagaacttgctcagatattttatctgggctttttctttttgtctgtcagtagtcatagcttttgctccttacacaaatctccttgtaggaataataatgatttcaaatttgcttccgtcctctaattcaagaagaatcacataatctgaatcccgatccggtaaaatggaacttattttcagcttcttactgtagttaattgcatcaaatatttttccgactactttctttgttttcatttgcttcttttcctccgtattaacgtttattgtccagcatctcagcaacttttttctgctgtgacgggtacagatgcccataagtgttcaatgtcatctgaatgtctttgtgccccagcctttccttgataatcagtggttctacgccctggtagatcagatatgccacatggctgtgacggatatcgtgcactctgattggttttacaccggtcagtgcttcatatttcttaagacgtttctgcagtgttctcgccacaatcgggaacaaccgctgatcttccggaaatccataatgcttctttgcatactcctgtacctcttccttaagaaaattgggaatatcaatagtacggaccgaattttctgtttttggagtatcaatcacatctcttttcttgatccggttataggtcttattgatatgcaggagatttccactcatatcaaaatccgaaagactcaatgccagaagctctccttccctaattcctgtccagaacagaatttcaaatatcagataatcttcactccccggctcaatcccggcgataaatctgtcatattctgctttcgtccagaactccagcttatttgcatccgatttccccatcttttttacttttttacatggattttccttcagattgtaaattttctgtgcatgattaaacagtgcatttaactgattctggatcatacgctcataagtcttgctgtatcctttttcctgaatggcattctgccactggataatctctgccggtgtaatttcattcatttttcttgttccaaaatatggaacaatgtgcttgttcatcatgtgctgcttattacggattgaattttctttcagttcattctttttatcttcaaaatagacttgaataaaactgttcatctccattttcatatccgctgcagtctttcttatgaattccttttcataattcaatgcttctttctttgtcttgaaccctcttttcagcttctgcgttttcttacctgtccagtcaatatagcggaagctcacataccaggttccctgtgttttgtctttgtaagctgacatcttaaaacctccttcatactgctctctgagagcatccataaaattttgtttcccagtagggacgtggaatctttccacaaactgctacatatccttcctttgccagttcatcattgagctgcttcagaatagaatatgctttactgcgtttcacacctaattcttccatgacatcatcaacagtcatcatataattagttctcatatcgtcctcctttccagtcacttttgtgactcttttgttgttctcttataataattcacttttgtgaatttatcaataaacatttgcgaatttattttttccattccatacctattgcttgcgtatcggcaatttgttaaatctcactcttttgtatcattcacttttgtgctagaatagaagcacaaatattattaaggaggcagcacattatggtaggtaagaaaatccgggcattccgggaattcagaggatacagtcagatacaattagccgagctgtccggcattaacgtaggaacgatcagaaaatatgaactgggaatccggaatccaaaaccggatcagttagaaaagatagcaactgcactgggattaaatgtaagtgtttttctggattttaatattgaaacagtcggagatgtactctctctgttgttttctattgatgattcagtgaacctctcacttgctgaaacacctgatcagaaggttgcgctgacattcgataatcctacaatgcaggactttttcaggaaatggtgtcaatttaaaaatgtctatgaaaaggaaaaagctgaaatattagctattgaagataaagataaaagacaagaagaactggataagctgaatgctacccaggaagaatggaaactgcgcgctatgggaactacgataggttgccatactatcgttaagaagggcactgaaggcaatgacatcaagacatatgatctgacttaattttgtgcataagaaaaagagctcacgaagagctctttatttttggtggtctgggggaattgcttatcattccatgctaccattacaccatatcgccgcaaatacccagacctactaataagatttcttttttcataatatcaattcctttcttgtaaatgcacttttcgatgtcatatactattcccgaaatcatagaactcaaaagaattcctaatatggtggcgatatctggaatcgaaccagagcctattgctaactttgttatagtggtagtatagcattgatttcaaatttgtcaatctgctttcaggattttgttatcattctgttatcacaaacggttgtcaggactctctccaggcaaccgtttttctatactgttcgttattcttttccactcttttgtacatttccaggcaacagaaaaacccgtagaaccgaagttctacgggtatcttacgtttggacacaacgttatcttgcgataacaaatctatattcagattgtattactcgatgattgtagcaacctttccagatcctactgtacgtccaccttcacggatagcgaatccaagaccctcttccatagctactgggtgaatcagttcaactgtcattgttacgtgatctccaggcatgcacatttctgttccttctggaagctcgcaaacacctgttacgtcagttgttctgaagtagaactgtggtctgtagttgttgaagaatggtgtatgacgtccaccttcatcttttgtcagaacgtaaacctgagctgtgaattttttgtggcatgttacgctgcctggtttgatgagaacctgtcctctttcgatttctgttctctgaacaccacgaagcagagctccgatgttgtctccagcctgtgcttcgtcaagaagtttacggaacatttcgattcctgtaacaactgttttcttaacgtcttcgtggataccaacgatttcaacttcgtcagatacgtgaagaacaccacgctcaactctacctgtagcaactgtaccacgtcctgtgatagagaatacgtcctctactggcatcaggaatggtttgtcagtgtcacgctgtgggtctggaatccactcatcaacagcgtccataagttccatgatcttatctccccactctccgtttggatcttcaagagctttcagagcagatccctggataactggagtgtcatctcctgggaattcgtactcgttcaggagttcacggatttccatttctactaattcaagaagttcttcatcgtctaccatgtcacatttgttcatgaatactacgatgtaaggtacacctacctgacgagacagaaggatgtgctcttttgtctgagccataactccgtcagtagcagctacaacaaggatagctccgtccatctgagcagcacctgtgatcatgttctttacatagtcagcatgtcctgggcagtcaacgtgtgcatagtgacgtttctctgtttcgtactcaacgtgagctgtagagattgtgattccacgctctctctcttctggagctttgtcgatgttttcgaaatcaactgctgcgtttccttctactcttacagaaagagtttttgtaatagcagctgttaatgttgttttaccatggtcaacgtgaccgatagtaccaatattagcatgtggttttgttctttcaaatttagctttagccattttgaatatcctccttaaatctgtcgcctgaaacggcaattttattggtttcgcttttaaatcggctaattctgattatatttcaaaatcagccgaatagcaagcatttttgcgatttttacgcatttttattggataatactttttcctgtacagacttcggtacctgctcatagctgtcgaagaacatagagtagttaccacgtccctgtgttctggaacgaaggtctgtagaatatccaaacatttcggacaatggaacgaatgcacgaacgatcttaccaccaccaaggtcatccataccttcaatacgtccacgacgggagttgatatctccaatgatatctcccatgtattcctcaggcattgttacctctaccttcatgattggctcaagaagtacaggagaagcctgtttcatagcatccttgaatgccagagatccggcaatgtggaatgccatttcattggaatcgacttcatggtaagaaccatcgtatacatttgcgtgtacaccgacaaccgggaatcctccaaggataccagatttcattgcctcttcgataccttcgccaactgctgggatgtattctttcggaattgcaccaccgacaacagtagattcaaatttgtatacttcctcaccgttgacatccattggctcgaatttaactttacagtgtccgtactgtccacgtccaccggactgttttgcatatttgctgtcgatatccactgcttttgtgatggattctttgtaagcaacctgtggagcacctacgtttgcttctactttgaattcacgcagaagtctgtctacgatgatctcaaggtgaagctcacccataccagcaatgattgtctgaccagtttcctgatctgtatgcgcacggaatgttggatcttcttctgcaagttttgcaagagattctccaagtttaccctgagaagcttttgtcttaggctcgatagcgagctcgataaccggctctgggaattccatggactctaagataaccggatgctgctcgtcacagattgtatctccagttgtagaatatttaaatccgattgcagctgcgatatctcctgagtaaactttatcaagttcttcacgcttgttggcatgcatctgaaggatacgtccaacacgctcttttttctcttttgttgcattcagaacataagaacctgagttcattgttcctgagtacactctgaagtatgccagttttccaacgaatgggtctgtcataatcttaaatacgagagcagagaatggttcgtcgtctgaagaatgtctctctacttcgtttccatcttcatccacacctgtgatagccgggatgtctaatggagatggcatgaattcgataactgcatccagaagtttctgaacacctttatttctgtaagctgtaccacagcaaaccggaatcgcatcacatgtacatgtagcttttctcagtgccgctttcagttcctctacagaaggctcttctccttccagatatgccatcatcagatcgtcatctaattcacagatcttttcaaccagctctgtatgatacagttctgcatcttcctgcatctcttccgggatatcaatgatagaaatatcatcacctttatcatcgttgtagatatatgctttcatttcaaaaaggtcgatgattcctttgaattcatcttcttttccaattggaagctgaatgcagattgcatttttaccaagtcttgtcttgatctgttctactgttccgtagaagtttgcacctaagatgtccatcttgttgatgaatgccattcttggtacattgtaagtgtctgcctgacgccatacgttttcagactgtggctcaacaccaccctttgcacagaaaacgccgacagcgccgtccagtacacgaagggaacgctcaacttctactgtaaagtcaacgtgtcccggagtatcaatgatgttgatacggtgctctaaagcgccctcttttggtttgcagttttcctgcagagtccagtggcaagttgtagccgcagaagtaattgtaatacctctttcctgttcctgctccatccagtccatggtagcattaccttcatgagtattaccaatcttatgattaacaccggtatagtaaagaatacgctctgttgttgtagttttacctgcatcaatatgagccataataccgatatttctggttctctctaatggatattctcttccagccaaggttttttcctcctaatatattgtagttccccgaaacaaaaagtcccggagaacatgccatttgcttaagccgccaatctgcggctgccgctttggctcttagaaacggtagtgagcaaacgctttgtttgcttctgccattttgtgcatatcttcttttttctttacagatgctcctgtgttgttagcagcatccaggatttcgttagctaatctttcttccattgtcttctcgcctctctgacgggagtacaatgtgatccagcgaagtgcgagagcctgtcttctgtcagctctgacttcgatcggcacctgataagtagctccaccgatacgtcttgcttttacttcgagtactggcatgatgttgttcatagcctcttcgaatacttcgatcgccggtttttcagcttttgcttcaactctttcaaatgctccgtatacaatcttctgtgctacacctttcttaccatctaacatgatgttgttgataagtttggtaacaactttattgttgtatattggatccgctaatacgtctcttttctgagtatgtcctttacgtggcacggtccttccctccttaatcataatttccggattctttccgggattaattcatcggtactcacatgtgtctttctatggaatcacaattcatgtgtcgcggccgcgggacgattgtatctaaatccgcagccctaacttattgaacatctcgtccaataaggtacgataatcatagttctgtttgtgatacgatttaactatttagttacttctttgctaagcgctctgtttcttatttagcgtcttttggtctcttagcgccgtatttagaacgagcctgtcttctcttagcaacacctgctgtatcaagtgtacctctgacgatgtggtatcttgtacctggcaggtccttaactcttcctccacggatcagaacaacgctatgctcctgaaggttgtgtccttctcctgggatgtagcttgttacttcgattccgttagaaagacgaactctggcgatttttctcagagctgagttaggcttcttaggtgtagctgtcttaactgctgtacaaacacctctcttctgtggtgcagatacatcagttgcacgcttctgaagggagttccatcctttctgaagtgccggtgctgtagatttcttttcagaagtctgacgtccttttctaactaactggttaaatgttggcattctttttcacctcctatgatttcactcgttgtcttccggcttatgccgaaagggctgcagataatggttcattatctgatatttgcgcacaaaaacagaatttctcctgtgcacgctaaactagtgtattacgttttttcccgaaagtcaagggattttctaagattttctgcaactattctctcttttttattcgaggagccagcaccatatcggcagtgtgaataatgacaggatggtggtgacaaagatcattcctgttgcatatccctcatttccatgatatttggcagacagcagtgcagttgtcaccggtgtcggcatccccgcaataataaccgtaattccccgaagtaatgcaggaatcggaagcagtgcggtaagcccgaataaaattgccgggatcaggatcagtcggacaatggtgtaaagcaccattgttccatccagtattcctttcggattcatctctgccagcatcatgcccaccaacatcatactgaggggtgtattacagctgctgatcccggaaatcgtattttccacacttaccggaaaggaaatccctgcgatcatgaccaaaagtcccagatagatggccacaatacatggatgtgtcagcaccttttttaccagactttcacttttttctttcataaaacaggatgttcccacactccacatgacaatcctcaccggaagcataaacacggaagcataaaatagtccattcgttccataaattccttcgatcacaggatttccgagaaaaccgccatttgaaacgatcgttccatatcgaagcgactttctcttatccggttcagcctttctgtaaaagatacagctcattattatagaaagaatacaataccctgtcgcaagaagcagaacctgggcaaagcttttgagcatgctccactcccattccatctgaaaggaatggaagatattaaacggcagtgtaacatacagacagaaattgaccatgtctttgcgtcctgtctctccaatgatattcttttttctcaccagaaatccgactgcaaccaacagaaacatcatcagctgcatgttcaccatattctgaaatgccatttttagtacgctttaccccaatataccatgtgcttcgccggttttccacagcatacacacacatctgaaatctgttcctgttcctctggaatacatctggatgtcactcctcctgtctgagctttgatttcttcttcacaggcatcatctccacaccacattgctttgataaatccgatctcttcctgtgccactttcaccatctcattcatatttgctgctgtgtggatatgagaatcaaggaatgctttcgctctctcaaacatatctttctgaattgtctccagaatttcggacagtttttctgtcagctcatccattcccactacaattttttctcttgtgtcacggcgaacgacaacaacctgaccattttcaatatcttttggtccgatttcgatacgtgtcgggattccgaccatttcctgctcgctgaatttccatcccgggctcttttcagaatcatcgatggaagctctgtatcctgctgccttcaatactgcaagcagttcattagctttgtcaagcacaccctctttgtgctgtgcgatcgggatcactcttgtctgaactggcgcaatgtgcggaggaagtaccagaccactgtcatctccatgtaccatgatgatggctccgatgatacgtgtggacagtccccaggatgtctcatatacgctgtgcagtttgttttctttatcagaatagctgattccatacgcatccgcaaacgcatttccgaagaaatgactggttcctgactggagtgcttttccgtcatgcatcagcgcttcaattgtatacgtatcctgtgctcctgcaaatttctcacttggtgtctttcttcctgtcacaagcggaattgccagatcgtcttctacgaaactcttgtatacatcacgcatcagaagtgttctttcttctgcttcttcatatgttgcgtggatcgtatgaccttcctgccataaaaattctctggaacgaaggaatggtcttgttgtcttttcccatctcagcacagagcaccactgattccaaacttttggaagatctctgtaagactgtactgttttgctccacagatcgcagaataaagtctcagatgtcggacggatacagaatctctcctgcagttcttccattcctccatgtgttacccacgctacttccggtgcaaatccttcgatatgatctttttctttctgaagcagattttccggaatcagtaccggaagatacacgttttctacacctgtctctttaaaacgtttgtccaggtttgcctgaatattctcccagattgcatatccgttcggaagataattcaaacatccttttactcctgaataatcacacaattttgcttcgcgcaccacatctgtgtaccactgtgcaaaatctacttctctggccgtaatggattctaccagttttttttcttttgccataatgttctcctcttctttcttctctgtttttgtttcttctgggaagtatcctgccctgtattttttcgtaaaaaagccgagccttccttcccgataagggaccgaaagactcggcggtaccaccctgattaaccacagtatctctgtgattctctcttacaccgttaacgccggttctacgccgcattttcatacgaaagctcccaggccggttctataccctttccgcagaagcctctcacctgactgcttcttctctgtgccgttctctgatatatactaatcctgttcttcacccatctaacatattcatcgtgaattctaactgaatttctcacgattgtcaagcaatcagcgcacctgcagcaatttctgtttcaattcattttccagacgctgcatctctgcctctgcttcctgacgtttttgccttccttcctgctgaatctgcatcacttcatccaacgtagagattaaggattcatttgtcgcttttagtgtttccatatccacgattccacgctcagattctcttgcagtttccagcgtcgccatcttcaatgtatccgcattctttttcagcagttcgtttgtcatatccgtcacttccctctgagctgctgccgcctgtgcagaatgcgccacaccgagcgccagtaccatctggctcttccacagcggaattgtattcacgatcgtggactggatcttttccaccatcacggtatcattgttctgtaccagtcggatctgcggtgctgtctggatggagatcattctcgtcagttccagatcatgaaccttcttttcaaatcttccgcacatcgcctccagatctcttgctgcctgtgcatcctctgcaagtccgctggcctgcgctttcgtcaggagttccttcaactgtccctcctgcacttcttccagctttttctttcctgccagaatatacatcgtcagctctttaaaatatgtcaggttcaattcatacatcttatccagaatcgcaacatctttcatcagctgtacctgatgtccctccagagcctggcagatctggttgatattcgtctccgccttggcatattttgttttcagtgcctgaatcttatttgcctgctttttgaagattccgaaaaatcctttttcttcttcctcgtcaaaatttttcagctccttcacaacattcccgagaagttctcccacttcccccaagtcctttgtctttacattttccagtgctgtctctgaaaaatccgccatcttgctctgagttcccgcaccatactgcaggatcatggcagaattggtcaaatcgatctgatttgcaaactgatctgccatctttctctcttcttctgacagaacattttcatccatcagaggctcttcttttttcacttccggctgtgctttttcttcctccgcaaatggattcagtgtcagtgtcggtgctgtctgaaaatctttcaattcttcgctcatcattttcctcctgttgaaaagtcatttttcgtaagtccttcctgcgccagcattgtcttcagcacagaaatatcagaggacacatcccacgctgtctcctgaaacagatcatccagaagcttttcaaatgcgatattcaatgtatccagtgtatcctcaatctcctttttcgaagaaagaatattctccccctgcacaggctgtgcatccagctcctcatatgcctctaaaagcttgactgccgtcggaagataatattccatcagcctgcgaatatcggtcaccacttccgggttctgttctacccgcgcaaagatccgttttgtcaaaagctccattcgggacatcttttctgataccacttctcccggaattgcatcattacattcccggatcttgcggatatatgcatttcccgcttcaatcacttcctgtactttcggatccagacctgctcttctgtcagcgtctgctttttgtctctctttcgtctcctgctctctggctttctgctgccttgcctgtgccatcagttcctgatactgctcaaatgcttccctgctggtcatcagacacgctttctgctcatccagatgcccctgaagaaaccatccttttctgatcatagtttccagatcttttactacaaatttgtcttttttctgtaccctcagcgccagatctttcacatttccatattctctgccctgtagctcttctatataagtctgaaaccgcttcaccctgcttaaaagttttgtcccagtgattccaagcgccgtaaatactgccagaaggatcacctgtatactaagtgcgacggatacgccgactcccgctccaagcagcatcccggtcacacctgtgatcagtccgccgatcaaaagacatcctgcaatcgtataacctgtgatcgtcatcgtcagtcctgctgcttttttcgctctcgtcccagcatacaatgtggggcgttttaactgattcaaatccagattctgccaggcaccctttgtcctgtccttttgcctcccggtaccatagtccgctttctgatactgatatcctccgcgggggtttctcatcccgtctgtaaattcatgaaaggcactgtttactgtatctgtaatggtctgattcaatctccgaaaatctctggagtccactgcatcctgcacggtccgtctgatatcctcaccgaactgttcccactcccaatttgtcctcatatcttcaacctcctgccgccagtcaattcctaaagtatcctgtctctgatttccagcagatcactctatgtaaatcagtttagagatgttttctgtaaaagtcaagaatcccttgaccactcttttgttttatatgataattgtagcagatttcacaagaggagcgtatcaaaatgaagccacatattttatatgaagaccaggacatcatcgtatgtctgaaacctgccggtatcccgactcagacaagccgccccgggcttccggatatggtcagcattttaaaaaatcatatctatcagaacagcgcacacaaaaaacaaccttaccttgcagtaatccatcggctggatcagccggtagaagggctgcttgtatttgccaaaacacctgccgctgccaaagagctgaaccgtcagctccagagttttggcttcggcaaatattatcaggcggttcttctcggatgcccacagactgctgacggaattttagaagattatcttgtcaaagacgggcgcacgaacacttccagaatctgtacagaagagacgccgggcgccaaagttgcacgcctttcctaccatattgcaaaaacaacagcggaattttcactggcagagattcatctggataccggacgtcatcaccagatccgggtacaaatggctcaccttggctgtcccatcgcaggagaccgaaaatatgatccgaaccagacttctttttcccaactgcagctctttgcctgccgtctggaattcgcacatccaaaaacaaaaaagcacatggaatttacccatgcgcctgttttgcgtgtttttgccgacgaaacaccagcagatcatcctgtcggataatcgtatttccattgggaatgagagtgcttccttctcttttgaccatgacaatgagcacccctgctttctggtccagctcattcactggtttatcccgccatttatgatttttatcaatttccacctcatacaatgtcagattttcccggtcttcaaaggccggggctgcacaaatcagcagatcgccgccttctaaagatgtatcaccattcggcatcattgtctcctgtccccgaaacagcagtaccactaaaactcccggcggcatttcgatttcttttagtgtttttcctgcaaacggatgattgtcagtaatcttgatcttgacaaaagaaatatcattttcatcctgatagtcattaaacgtccgcatgacattggcattcttatcgatcatttccagctttctggatacagccggaagtaaggtaccctgaaccgcaagagacagcagtacaatcacaaataccatgttaaacaaattgtatgtcatcggaatgccggataagacaacataaatagaaaacacaatcgatgccactccccgcaatccggcccaggaaacaacgccgatctgctgccaggatgcaccaaacggctttaatatcgcaagcactgacaccggacgcccgataaacagcataaaaagacataaaagcaatgcgggaacaaacacttccggcagctgtgacggcgttacaagcaatcccagcaagaagaaaataaccatctgtgcaatctctgtcagaatatcaaaaaagtggaccatctcttttttgtccggtataaaccgatttccaatcagaattccgcacagatatacactcagatatccatttccaccggcaacagacggcaacgcatatccaacgatcactgctgcaaataaaaagatcgttcttccctgtttcatcccaaaatcaatctgattcaaaataaagacagaagcttttccgatcaagaagccgcaggctgctccgatcagaatctgtttcagcagaagaccggctaccgagatctgctctccggaaacaagagagatcatcaggatcgtcatcatgtaagatatcggatcgttagatcccgactccagctccaacagagaatctgtattgtacttcagagagagctgcttggatctcagtacattaaatacggacgctgcatctgtagatgcaatgaccgatccgatcaaaatcccttccatccagcccactcccaacagcacatgcgctgctgcccctaccagcgctgcggtcatcactacgccggctgtggaaagtaagaatgcttttcccattaccggttttgcagtctttagatttgttccaaaaccaccatagaacatgacaaacaacagactgaccgaacagattgcctctgacagttcataatcatcgaacggaatcttgaaaaaaccatctactccaaagcacattccaagaccgataaacaataacagtgacggcagcggaagtttagcagcgatgcggttcattaaaatgcaggccacgatcaccactcctgccagtaataacaattgattcatcctgtccctccttctgattttaatactttaccattttaacaggaattccgttctttcgcaatttttctctctttttaaaaacagcggctgcctcatcgtttatccatgagacagccgctgctcttattttcctcttcttacatttccccagattcttccgtatctgcttccagagattcctgataccgatccaatatcgtattctgaatcttttctcttgtaccggaattgatcggatgtgcgatatcgcgatattccccatccagagcttttttgctcggcattgcgataaacaagcctttttccccttcgatcaccttgatatcatgaactacgaattcattatcaatcgtaatcgaaacaactgcttttaattttccctcttttgtcaccttgcgcacacgaacatctgtaatctgcatactgttcaagtctcctttctccgcctgcattactgtctcaattccttataatgcatacctctcgtttttttcaactaccacttttacaccactctcaccaacatgacgtgtattggctctgatcgtatctctgctctctacaatacaattttcaatatatgtattgtccccgagatatacatcatttaaaatgattgaatttttgatcacacagttattgccgacaaatacttttttgaagataatggagttttccacagttccattgatgatacttccgcttcctataaggctgttcttgacggctgctcccggattgtattttgcaggcggcagatcgctcaccttggaatacacactcggagcatccttaaagaaatactttctcacttccggcttcaggaaatccatatttgtctggtaatatgcatccactgttgagatgttgttccagtagctgtttatcttataaccgtaaattttcttcagattcttataacgaatcagaatatcggttacaaaatcatgtctctcttcctctgcgcaatgctctatcagatcgatcagaagccttcttctgattacatagattcctgtagagatcgtctgggattttgccaccataggcttttcttcgaactcttcaattctggcagattcgttcatgcgtaccgtaccaaaacgagtcgcatcttctctgtcatccagatccttacacacaactgtaatatccgctttctttgcaatatggtattcaaggactttattataatcaagcttgtacaccgcgtctccggatgtaatgatcacatatggttcgtgacactttttcaggaaatccagattctgatagatcgcatcggctgttcctctgtaccagtccccgttattcgcagtgatcgtcggtgtaaatacatacagaccaccctgctttcttccgaaatcccaccattttgaggaattcagatgttcatttaaagatctcgcattatactgtgtcagaactgccactttctgtatatgcgaatttgtcatattgctgagtgcaaaatcaatcgctctgtaactgcttgccaccggcatcgccgcagctgcacgtttcgctgtcagctccctcatttttctgctgcttccacctgccaagataatccctactgctctcatgaacgttcacctgcctttattaatgtctcgccgcctgcaagtactccatcgctgtaatcttccggcacggtataaccactgattgcagtatttttgccaatctgtacattggatggaattctggagttttctccaatcgtagccagtccgccactgtaaatattcggtttttctttgttcggaacctcgcttccgattccgatcacaacattgttgccaatctcagtgccttccgcaataatcgccttgtctatcacgcaattatctccgatcacaacatcacgcatcaggatagaatcccgcacgatactgccttttccgatcgtaactcctccgcctaatacggaattatgtacttctccgtaaatctcagaaccattgctgatgatgcaacggtctaccacagactgatccgagatatactggggcggaatattggcactgtttgtataaatcttccagaactcttcatacagattgaattccggaatgatgtcaatcagctccatattcgcttcccagtaagaactcaatgttccgacatccttccaatatccgttgtattcataagcaaacattcttcttccgttttcgtgacaatatggaatgatatgttttccaaaatcacaattcggctgctcggataatttcagaagagcttctttcaataccggccagctgaatatataaattcccatggatgccagattactgcttggcttctccggcttctcttcaaattctttaatcttgctttcttcatctgtgactacaattccaaatctgcttgcctcttccatcggcaccggcatcgctgcgatcgtaacatccgcatgatttgccttgtggaaatccagcattacttcataatccatcttataaatatgatctcctgaaagaatcagcacataatccggattgtaagtctccatgtaatccagattctgataaatggcattagccgttccggtataccactcgctgttcgcgctcttctcataaggaggaaggattgtaactccgccgatattacggtccagatcccacgggatcccgattccaatatgggtattcaaacgcagcggctgatactgcgtcaatacacccaccgtgtctactcctgaattaatacagttactcaatggaaaatcaatgattcgatatttccctccaaaagccactgccggttttgcaacctttgcagtgagaactcccaatcgactgccttgtccgcccgcaagcagcatggcaatcatttccttcttaatcatgtagtcacctcatttctagttgattgctgttattataccatatttttctcatccgtacatgttttttacaaaaattttgcataatctttttcctttttgtttatttggtacaaaaagaacttcttttaattttccccatatatagtataatataaactgcaaagaaattttatgactaaatttaataaactttttacttttaaaataaaacacacaagattttcaactattttcatagtaagggaaggtaatcatcatatgtataaaatcaatttcaatcagcctattcacgttcattttatcggtatcggcggcatcagcatgagcggtcttgccgagatacttctaaaagaaggatttaccgtatccggttctgactcgaaagtctctccgcttaccgaacatctggaagcaaaaggggctcagattttttatggtcagaaagcatccaatatcatcgacgggatcgactgcgtcgtatacactgccgcgatccgcagagaaaatgcagagctgatggaagctgttgcaaaaaaaatcccaatgctgacccgtgcggagctgcttggacagctgatggccaattacaaaactccgatcgcagtatcaggaactcatggcaagacgacaacaacttccatgatctctcatgttctgctggcaggtgacacagatcctacaatctctgtgggcgggattctgcaggccatcggcggaaatatccgggtcggaagctcaggcatcttcgtcacagaggcctgtgaatatacaaacagcttcctgcactttttcccgaagatcagcatcatcctgaacattgaagccgatcatctggatttctttaaagatctggaagatatccgtcactcctttcatcagtttgcagccctgctgccatctgacggaacactgatcatcaacggagagatcgatcagtatcaggaaatctgcgaaggtctggactgcagcgtggtgacttacggaatgtctccggaatttgactacagtgcgcagaatatcacctacgatgaaaaaggccgggttgcatttgatttcttccgaaacggaaagatggacacacacatcgtcctttccgtgaccggagatcacaatgtatccaacgccctttccgcgatcgcaacagccgagctgctgggactttccatggatacgatccagaaaggtctgctttccttctccggaacggaccgccgttttgaatacaagggaacgatcgatgatgtcaccatcgtagatgactatgcacatcatccgacagagatcaaagcaactttaaaggctgcgaaacactatccacaccgcaaactctggtgcgtattccagccgcacacatacacaaggaccaaagcattcttccaggaatttgcagaagctctttcccatgcagatcatgtgattcttgccgatatttatgccgcacgggaaacagatactcttggggtatcctctgaagcgctctcagacgcgatccgcagccttggaacagattctcactattttccatcctttgcagagatcgaaacatttctcaaagaaaactggaatgcaggagatcttgttcttacaatgggtgccggagatgtggtaaaaattggagaagatctcttaaaataggacttatccacattatccacatgggttattcacaaaaaagcagattttcccttgaaaaaaggcttttgcccgttcagataagatgctataatacctttgcgcatgagagagcagcgtatgaattccggaaaacagggagaggactatgaagacatttacgttaaaaaataaattccagacaaatgccacactggttgcgaacgactttatcgatcactatatggtgcaggcaaacggcgaatttgtaaaagtatatctgttccttttaagacatttggataatgccggctcttctctgacagtttctgcagttgcagactgtctgaacaacacagaaaatgatatcctgcgcgcattcaaatactgggaatccaaaggacttcttcagatggaatgtgatgcagagggacatgtctgtgaactggaactgatccagattccccagacccaagcacagataccgatcactgcggccaaaaagccttccgcaccggttgtctctgtcaagcctgctgctcccaaagctgtggcagcttctgtttcccgcccggcggcgcacgcagatgccgcaaaggcgcaaaagcagctaaaatcgctcctgttcattgcggaacagtatcttggtaagactctgacaaagacagatatggatgcgatcacttatttttatgatcatctcggcatgtcggctgacctgatcgaatatctgatcgaatcctgcgtggaaaacggccacaaaagtattcattatattcagaaggtcgctttatcctgggcagacagcgggatcactaccaaagagcaggcaaaacagcaatcccgcagttataataaaaactgctacactgttctgaatgctttcggaatcaaaaatcggggacctgccgcatctgaggtttcgtatatccagaaatggaccgatacctatggatttactctggacatcatcgaagaagcctgcagcaggacaatttctgcaactcatcagccaagctttgaatatgcagacacgatcctgaccagatggcacaacagccatgtacatcatttgaaagatatttcggtactggatgatgcataccagaaacaaaaagccgtttcggctgcctcagctccaaaagcaaaacctgtctccagaaatctgaacaatttcgaacgccgttcatatgacatggattctctggaggagcaactattaaacagcaattagaaggagagcactgtcgtgggactaaaaaattcacaatatcaggcgattatgcgtaagtacgagcaaaaacaactccgaaaccatgatatactgacacagcattatgaagaggtctaccgtcagctgcctgaatttaaatcactggatgattccatttccattttgtctgttcaatatggaaaacgcctgttaaacggcgatcaaaaagcaatttcttctttaaaagaagagcttgccattttacgcgccagcaagcaggagcttttacgatccagtggttttccggctgattatctggaaccggtctatgattgtccgaattgtaaagataccggatatatcggaaaccaaaaatgtcactgtttcaaaaaagccatcattgacttgctttatgaacagtcaaacttaaaagaaattctcaaaaaagaaaacttcagcaactttgctctggactactattccaccaactttattgacccgaagaccggccgttcttcccgccaggtaattgaagatgccctgcggatctgccggaatttcgtcacttctttcggaacagatttccagaatctttttctgtatggagatgttggtgtgggcaagacctttttgtccaactgcattgcaaaggaactgatggataaagagtattctgttctttacttttctgcatccaagttcttttccagtcttgcaaaacatgcgtttgacaagcaagatgtagatgcgcagaatatgtttgaactgatctacaactgtgactgtctgatcattgatgatctgggaaccgaatatacgaacaattttattgcatcccagttcttcacatgcatcaacgaacgactgcttaacagccgttctacaattatatcaacaaacttgtcactggacactctggctgatctttatacagaacggtccttttccagaatcacaagtaattatatcatgttgaaactgataggcgatgacatccgaatcaaaaagaaattaaaaaacagggaggaaaattaatgttacgtcgaaaagaaagaaacttagaaaatattccagtaggagcgctcggactgattccggtcagaggatgcgaaggtcttggagacaaggtcaatgattatctggtaaaatggcgcaaagaaagcggttctgaacataaaggagatgtcgctttcaccggttatgacagagatacttttatcattgatgccgatgttccgagattcggttccggagaggcaaaaggaatcatcaaagagtctgttcgtggaaaagatctctatctgatggtcgacgtatgcaactacagcctcacctattctctgacaggaaacacaaaccatatgtcaccggatgaccatttccagaacttaaagcgtgtaatcgctgcagtcggaggaaaggcgcgccgcatcaatgtgatcatgccattcctttacgaaagccgtcagcacaaaagaacaagccgtgagtctttagactgcgcactcggacttcaggaactggtacgcatgggcgttgataacatcattacttttgatgcgcacgatcctcgtgtatccaatgccatccctctgagcggatttgagacagttcctccaacttaccagtttgtcaaaggacttctgcgcaatgtaaaagatctgcagatcgacagtgaccacatgatggcgatcagcccggatgaaggtggtacgaaccgtgcgatctaccttgcaaacgtacttggactggatatgggtatgttctacaaacgccgtgattatacacagatcgtcaacggacgcaacccgatcgttgcccacgaattcttaggaagctctgtagaaggcaaagacgtgatcattatcgatgacatgatctcttccggagattctatcatcgaagttgcaacagagctgaaacgcagaaaagcaaaacgaatctttgctgcagctacatttggtcttttcacaaacggtctggacaagttcgatcaggcatatgaggacggaacaatctccggtattctgacaactaacctgatctatcagacaccggaattattatcaagaccatactatatcaactgtgacatgagcaaatatatcgctctgatcatcgatacactgaaccacgacggttctatcagcagtatcttaagcccggatgagagaatccagcatgtactgcagaaatataaaaacggagaaacgatttaattagaaaagagggaaactgtttcattgattgacagtttccctctttatttcatatggtggaaatctggttttcattccccctgataacaaaatccgatccaccagtgtttcttgcagccaacagaatcatcataaaaacagccaattttcaagctgaaaattgactgttctataaaatatcttacagtaatccaccgattgccataaacaatggcgcaaatacaagtgatacaactgtcatcagtttgatcaggatattgatggatggtcctgatgtatctttaaacggatctccaacagtgtctccgacaaccgctgccttgtgagcctcgcttccttttccgccgtgatttccttcttcgatgtacttcttggcattatcccaggcaccacctgagtttgccataaaaatcgccatgagaacacctgtcacaagcgcacctgcctgaagtccgccaagagcttccactcctaacacgattccgaccaggatcggcacaacaactgccattgctcccggaagaagcatctcatgaagtgcagctgtcgtagagatagatacgcaagacttataatccggtttttctgttcctttcataattcccggtttctcacggaactgacgtcttacttcctcgatcatcttatatgctgccttagatacggattccatggtaaatgcggagaacaggaatgtaagcattcctccgataaacaatccgatgatcacacgataatccagcacattgatactttccagatgtactgcctgagaatacgaagcaaacagtgccagtgctgtcagcgcagcagaaccgattgcaaagccttttcccatagctgctgttgtatttcctacagaatccagtttatcagtgatttcacgtaccgatttgtccagacctgacatttctgcgattccgccggcattatcggcgatcggaccatatgcatccaccgcaactgtaattccagttgtagaaagcattcccactgctgccagagcaattccgtacaatccgtctacctgatatgctacaaaaataccgatgcagatcaggatcagcgggattgctgttgactgcattccgactgcgattccactgatgatcgtggttgccggtcctgtctcagactgctctccgatcttcttcaccggattgtaatctgctgatgtatagcattctgtaatcagaccaatgagaacacctacgatcagacctgcgattacggcgatcgctccgtcaaagtttccaaataaaaccttactcagtacaagagacacgatcacaaccagaagtgccgcaatattgcttcccatcttcagggctttctgcggacttgctttctcatccccttttacaaagaatgtaccgataatggatgctacaagtccacatcccgcgatcgcaagcgggaatacaactccggaaattgcagaaaccgcaacaccaagtgtcagtgcagaaacgagagatcctacataagattcaaataagtcggctcccattcctgcaacatctcctacattatcccctacgttgtctgcgattactgcagggttacgcggatcatcctcagggattccggcttctacttttccaaccagatcagcccctacgtctgcagcttttgtatagataccaccgccaacacgcgcaaacagcgcaatagaagatgctcccaaactgaatccggacagcacgtctacatcttttgtcagaatatatacaacgctgaccccaagcgctcccagacctgctacacacattcccataacggctccgcctgaaaatgcgatggaaagcgccttattcattccgctttctctggcagcattcgctgttcttacattcgcctttgttgcaacattcattccaaaataacctgccagtgtagaaaacaaagctcccacaacaaaacagattgctgttacccagttaccgatcccgaatccgatcagtaaaaacaataccatcacaaatacgatcagaatcttgtattctgcagtaaggaatgcgcgtgcaccctcactgatcgcagatgcgatctctttcattttctctgttccttcttcctgcttcgcaacttttacagccagatatccggcaaataataacgcgagaaccgatacgacaggaactacgtacattaaattttccattttctcctcctcaatctcaattttgggattttctgtgcatctgtacctccatcttatacagatgacactgcttctatagtttaccaaataaatgaataattttcaacagagaaattcattttatattcattcctcttatttttctttttagctgttttgtttatttttccatctaaaattgatatttaaaatccattatcctttttatatgtctattttttgtttattttgtatatttgttatttatttctcaatctttttctttacagtattatctcatttttgcaagtcattttttctttctttcattttttgttttttattacacagtatggattttttccttttattatggtaatctggttgcagagaggtgttatatgtatgaagacattttttaaaaatctgacctttactttcctttgccttggtatctccacgatactggcatttttcttttttaacctaggacaaaaaaattctgtcaacactgccctgatttatattctggctctgatcctgatcgctcagaatacgaccagttactggtatggtgctgtcgcctccgttttttgtgtcatcgcagcaaactatttttttacatatccctatttcaaactaaacttcatactggacggatatccggtcacatttatcggcatgctggctatttctcttatcaccagcgcgaccgccagtatgctcaaaaaacaaaaagccattgcctccgaacgggaacgaaagcttgcagaagcagagcgcgagaaaattcatgccaatcttctgcgcgccgtatcacatgatctgcgtacccctctgacgagcataatcggctcttctgcctcttatctggacgatgcccagaatatgtccgagcaagaacgtatggagctgatttcgaatattaacgaggatgcacagtggctgctgaatatggtggaaaacctgctctctgtaacgaagattcaaaatgaatccagcaaagtcaaaaagtcgcaggaaattgtggaggaagtcgtctccgaatcaattgtccgacttcagaaacgccttcctaaaatccagatccgggtttctatgccggaagattttctgatgatcccaatggatgctactttgatcgaacaggtgctgatcaacttgatggaaaatgcctatgtccattcctcgagctctgatcccatcgaccttttgatcaccgatcagccggactgtgtcacatttgcagtccgggactatggaatcggactggatcccgaccagatcccttttatttttgacggacagtacagctctgataccgctgacggacacaaaggaatcggcatcgggctgtctatctgccggacgatcattcatgctcacgacggcgtgatccacgctgccaatctggataaaggagccgaattctcctttacccttccaaaagaaaaggagaacgcaaactatgcctaaattcactgtattgattatagaagacgaaaaaaatattcagacctttgtaggaaagatcctgaaaaaacaggattaccgtgtactgtatgcggactgcgggaaagaaggactgaatctgatccattcccaatgtccagacgtaattattttagaccttggtctgcctgatatgaatggaaatgatattatccaggaagtccggacctggaccagtaccccgatcattgtcatctccgcacgaagtgccgaaaaggaaaaggttctcgcattggatcagggagcggatgattacattaccaagccattcggaacctcagaactgcttgcccgcatccgtacctccttaagacacagcaaccgcttatatactacagattctctttatatccggccctatcgctacgaagatctggtattggatttttccaaacgggaactgaccttagacaaacagccggttcatctgacccctattgaatacaaaattgtatcctatctggcacagaattccggaaaagtcatgacatacgccgccatcatttccaatgtctggggaccatacgcagacgacgacaataaaatcctgcgcgtcaatatggcaaatatccgaagaaagctggaaaaagaccctgcacagcctaaatatatctttacagaagtaggcgttggataccgaatgcaggaggattcatcagaaaacgattagcagtaatctcttatgctaagattgcgctaaaaaggcctcaaatctcttttctttttatgcctttgtcactaaaatagaatctggtccgatacaagggcaatttcattcaaaggagtgacagtaatgggcaataatatcgtaatgatacttttgatgatcatcggtggttctgcaggaattttttccacactgttcattttgatcagtctgccggtaaccattatccaaaaatttatccgcaaagcacgttacggatataaattaaccgattaactaattttattaaacctcttaccttataaaaacaacgaccgtaaaattcccgagaatcttacagtcgttgtttttcgctttattctactgctattttttttacccgtccaagtgctttctgtactgccggaatggagatgatcacgattgtaatcagtccttctgccagaaggaaactgtagttatatgcgatcggatatacggctgcaagtgatttcgggaaattgtccggcatgtagtccatccagtacaaatatcctcccagcgcatgaaacgctcccctggcgagaacagctacgatatagcctttgagcagtccattcttttgctttgcaaagaaacctgccacaccaagtgctgcgaaagccaatacataatcacagcatacctggaacagagaaagtacgtatggctcctgtaaaaactggagcattccatatgtaaatccaaccagaattcctgttcttactccataccagtttgctaccagcacgataaagagcatgctgcacagtgtcacactgccgccccatggcagagagaaaatcttgatataggaagtaataaaagcaagtgccattgccatcgcacagcacgcaagctgtttcgcggacattttatttttttctgaatttttaccggcaaaaaacaatgcaataccaaatacaacgattcccagcacaatacaaattgcatatcctgcagtcgtcagaccgccttctgcatttaccataaagttcaacataaaaaactcctccttgttttcgtgattgaaaacaaggaggagttccttgtataaacgagattacagttcctacgttggcattatccaaatcaggttataggtcgaagttcacaacttcctctcagcctgtcacacaagctccccttgttatcaatcgtattttattttattcttcgtccagaactacttcttccagatctgctgattctactgtctccactgcatcgctttcatccagttcttcagcctcttcttctgcttccagttctgtgtttaactgaacatcacggtacttcttcatacctgtacctgcaggaatatgtttaccgatgatgacgttctctttcagaccgatcaggtggtccaccttacctttgatcgcagcttctgtcaggacttttgttgtctcctggaaggatgctgcagacaggaaggattctgtagccagagatgcttttgtgataccaagcatgatctgttcacctgttgcagcctcttttccttctgcttccatctgctcgttcacttcgttgaactccagaacatctaccatagttccaggcaggaattcggtatctcctctttcctcgatacgaatcttcttcagcatctggcgtacaataacctcgatatgcttgtcattgatttctacaccctgcaaacggtaaactcgctgtacttcctggatcatgtaatcctgtacggcacgaagtcctttgatcttcaggatatcgtgaggatttacactaccttctgtcagctcatctccggcctccagatatacaccatcctgaatcttgatacgggaaccgtatgggatcaggtatgctttggattctcctgtctgatcatttgttacaatgatctcacgctttttctttgtatcgctgattgttgccgtaccggcaaactctgtgataatcgcaagtcctttcggctttcttgcctcaaaaagctcttcgacacgaggaagaccctgtgtgatatcgtcaccggcaactccacccgtatggaatgtacgcatggtcagctgtgtaccaggttcaccgatggactgagcagcaatgataccgactgcttcaccaacctgaacggcttcccctgttgccatgtttgcaccgtaacattttgcacaaacaccattcttacatttacatgtaaggattgtacggatcttcactgtatccagtggttcaccgttttcgtcaaccgcttttttcatgactctttctgcacgcttcggtgtgatcatgtgatttgctttgacgatgatatttccatccttgtctttcagatcttcacaagagaatcttcctgtgatacgctcctgcagactttcgatttcttcatttccgtccatgaatgcttttacatacattcccggaatctcttttccttctgccgcacagtcactgtcgtgaatgataagctcctgagaaacatcaaccagacgtcttgtcaggtatcctgaatcggctgtacgaagcgcggtatcggacattcccttacgagctccatgcgcagacataaagtattccagtacgtccagaccctcacggaagttggacttgatcggcagctcgatcgtacgacctgctgtatccgccatcaaaccacgcatacctgcaagctgtttgatctgcttgtcagaaccacgggctccggaatctgccatcatgaagatgttattgtatttatccagcccggaaagcagagcttctgtcaatttgtcatcggttgctttccatgtctcaacaacttctttgtaacgttcttcttctgtgatcagaccacgtttgtagttctttgtgatcttgtctacagtatcctgtgcagtctggatcatctccggtttctgcggcggtactgtcatatcagaaatcgatacggtcatcgctgctcttgtagagaacttgtaaccaatcgcttttacatcatccagaacttctgctgtctgagttgctccgtgtgtattgattactttttccaggatctgtttgagctgtttctttcctacgtggaaatctacttccagaagcagttcgtttccatctacttcacggtctacgaatccaagatcctgcggaataatctcattgaacaacattcttccaagtgttccatcgatcgtgcctgtcttcaccgttccgtccggcatctctctggaaacacggactttgattctggaatgcagtgtcacatatccattttcatatgccaggagtgcttcgtttaagttcttaaagaacataccctcacctgttgctcccggtctttcctgtgtcagatagtaaataccaagtaccatatcctgagaaggaacggctaccggtccaccatcggacggtttcagcaggttgttcggtgaaagaagcaggaaacggcattctgcctgtgcttctactgacagcggtacatggacagccatctggtcaccatcgaaatcggcgttgtaagctgtacataccaatggatgcagcttgatcgccttaccttctacaaggattggctcaaacgcctgaataccaagtctgtgcagtgtgggggcacggttcaacataaccggatgctctttgatcacttcttcgagcacatcccaaacctccggctggagtctctctaccattttcttggcattcttaatattatgagcagttccgtttgccaccagttctttcataacaaacggtttgaataattcaatcgccatctctttcggcagaccgcactgatagatcttcaattccggtcctacgacgataacggaacgtccggaatagtcaacacgttttccgagcaggttctgacggaaacgtccggacttaccttttaacatgtctgacagagatttcagagctctgtttccaggacctgtaacaggacgaccgcggcggccgttgtcgatcagagcatcaactgcttcctgaagcatacgtttctcgttgcgtacgataatatccggcgctcccagttcaagcagtcttctcagacggttattacggttgataattcttctgtacaaatcatttaagtcagatgttgcaaaacgtccaccatccagctgtaccatcggacgcagatccggcggaatgaccgggatcgcggaaagaatcatccactccggtttgtttccggattcacggaatgcttctacaacctccagacgttttacgattcttgctctcttctgacctgtggcattgacaagtcctgcctgcagttctgcatattctttttccagatcaatggattgcagcaattcctgaattgcctcagctcccatacctacgcggaatgctttgcttccccatttttctttttcttcctgatactctgcctctgacaggatctgtttgtactgaaggtctgtctcccctttgtccagtacgatataagatgcaaagtaaagaactctctccagtgttcttggggagatgtccaggatcagtcccatacggcttgggattcccttaaaataccagatatgggataccggagccgcaagggcgatatggcccatgcgctcacggcgtacagatgcttttgttacttccactccacatctgtcacaaacaacacctttgtaacggatttttttgtattttccacagtgacattcccagtccttacttggtccgaaaattcgctcgcagaaaagaccgtctttttctggttttaacgttctatagttaatggtctccggttttgtaacctcgcctcttgaccattccatgatcttttccggtgaagccagtccgattttgatcgcatcaaaagttaacggctgatattgttgttcattattgcttgctggcatataaacggctcctcctattcttcatcatccatgaattcatcaaattccaattccatatcaggagcgaaatcctcttcctcctgtggttctacgttctccagttcttccccgacgaattcctgctctgtgaatccatgtgctccgaaagattctttttcatcgcggtatttctttccttcgatgatcgagcgcaggtctgtctcgccgtaatctacagtctccatgatttccacttctgtgttgtcatcacgaagtacacgcacatccagggcaagggactgaagctctttgagcagtaccttgaaggactcaggaatacctggttccggaatgttctctcctttgatgattgcttcgtatgtcttgacacgtcccacaacatcatcggatttgactgtcaggatctcctgcagtgtataagatgcaccgtaggcctctaaagcccaaacctccatctctccgaaacgctgtccaccgaactgagctttaccacccagcggctgctgtgttaccagtgagtaaggacctgttgaacgtgcatggatcttatcatctaccagatgatgaagttttaagtaatgcatgtgtccaattgttaccgggctgtcaaaatattctccggtacgtccgtcacgcaggcgtactttaccgtctcttgaaagcggtactcctttccacagcgctctgtgttcacgattgtcagacagatactgaagcacttccggaagtaattcctctccgtgtttcttttcaaagtcttcccattccatatttacataatcatttgccagatccagcgtatccatgatgtcattctcgtttgctccgccgaataccggtgttgcaacattaaagccaagtgcttttgctgcaagacttaagtggatctcgagcacctgcccgatattcatacgggaaggcacacccagtgggttcagcacgatatccagaggacgtccatttggaagatatggcatatcttctaccggaagcactctggagacaacacccttgttaccatgacgtccggccatcttatcaccaacagaaatttttctcttctgtgcgatatagatgcgtacggactggtttactccaggtgaaagttcgtctccgttctctcttgtaaatacttttgcgtctacgataataccatattcaccgtgcggtaccttcagagaagtatctcttacttcacgtgctttttcgccaaagatcgcgcgaagcagtctctcttctgctgtcagctctgtctctcccttcggagttacctttccgaccagaatatctcctgcacgtacttctgcaccgatacggatgatacctctctcatccagatctttgagtgcatcgtcaccgacaccagggatatctcttgtaatctcctcaggtcccagttttgtatctcttgcttctgcttcatattcttcgatatgaacagatgtataaacgtcttctgcaacgagacgctcgcttaacagaacagcatcctcgtagttgtaaccttcccatgtcatgaaaccgatcagcgggttctttccaagagccatctctccattggatgtagacggtccgtctgcgatcacctgtccggcttccacacgttctcccttgtctacgatcggcacctgattgtagcagttgctctggttacttcttaagaattttgtcagtttatatgttttctttgttccatcgtcatgtttgatcgtaatgcttgtagatgtagagctctctaccacaccagctctctctgcaaccatacatacaccggagtctaccgctgcttttacttccatacctgttccgactgccggagcttctgttgtaagaagcggcactgcctgacgctgcatgttggatcccatcagcgcacggttggcatcgtcattctcaaggaatgggatcaatgctgtcgcaacagagaataccatctgcggagacacgtccatataatcaaatttgcttctctcatattcctgtgtctcttcacgataacgaccggatacattcttatgcaggaagtgtccttcctcatccagtggtgtattcgcctgtgctacatgatagttgtcctcttcatctgctgtcatatacacaacatcttctgtaacgatcgggttcatcggatctgttttgtcaatcttacgatatggagcttcaatgaatccatattcgttgattctcgcataagttgcaagcgagttgatcagaccgatgttcggaccttcaggtgtctcgatcggacacattcttccatagtgagaatagtgaacgtcacggacctcaaatcctgcacggtctctggaaagaccaccaggtccaagtgcagacagacgtctcttgtgagtcagctctccaagagggttgttctgatccatgaactgagacagctgagaagaaccaaagaattctttcacggctgcagtcaccggcttgatattgatcagagactgtggagaaactccgtcctgatcctgtgttgtcattctttcacgaacaactctctccagtctggacagaccgattctgtactgattctggagaagctctccaaccgcacggatacgtctgttgcccagatgatcgatatcatcatcgttgcccattctgtattccagatggatgttatagttaatagaagctaaaatatcttcttttgtaatatgtttcggaatcagatcatgaatatctctcttgatcagagatttcagttcttccacatctcctgcagattcttccagaagtcctgccagtacagggtagtatacctgctctgtcactccgacttcttccggatcgatatccacaactgcctgcagatctaccatcatattagacagaatcttgatattgcgggactcatcctctccctctacccatacaaacggagcaccactgttctggatcgcatctgcaatctcagctgtgatcagagttcctttttctgcaacaatctctcctgtcagctcattcacaacatcctctgccactttctgccctttgatacggtttttcagtgccagttttttgttgaatttgtaacgtccgacttttgcaagatcgtaacgtctcggatcaaagaacatgcttgtaatcagactttctgcactgtccactgcaagcggctctcccggacggatcttcttatataattcaagcagaccttcctgatagttctctgctgtatcttttccgaaacttgcaaggatcttcggttcttcaccaaacaggtcaataatctctgcatttgttccgataccaagtgcacggatcaatactgtgatcggcacctttcttgttctgtctacacgtacatagaaaacgtcattggagtctgtctcatattccagccacgcaccgcggtttggaattactgtagaagaatacagctcttttccaagcttgtcatgtgcgattccataataaattcccggtgaacgaacaagctgacttacaataactcgttcagcaccattgatcacaaatgtacctgtctttgtcatcaatgggagatcccccataaaaatctcatgttcgttgatctcatcagtctctctgttgtagagtctgactctcactttcaaaggtgcagcataagttgcatcacgttctttacactcttcaatcgtgtacttcacgtcatcctcgcaaagtgtaaaatctacaaattccagactgaaatgacctgcatagtcagaaatcggagaaatatcatcaaatacctcttttaatccttcatccagaaaccactgataagaatctttctggacttcgattagattcggcatctctaatacttctttttgtctggaatagctcatgcgagaactttttccacttgtgatgggacgaattctgtttttctccatatgacgtttcactcctcatatatttttttgcgggcagcaagtaccctccaataggttccagtaaataggaaaagagccctgtgacaatatttctcttcacttcatggcatacctttccataatagcgcatttttaactatatcacaaaactcttttttctgtcaacatattttggtttattttctcaaaaaactcttgacaagttttctcatctatggtattaacgcaaaaaccgcagaagcgttcatcttctgcggtctcatctggcttttatcagcaattatttcaggttaacttctgcaccttctgcttctaatttagctttgatttcttcagcttctgctttagaaacgccttcttttactaccttaggagctccgtcaactacttcttttgcttctttcagtccaagtcctgtgatctcacgaacaactttgataactttaactttagatgctccagcagatactaattctacgtcgaactcatctttctcttctgctgctccagctccgtctccagctgctgctgcaactacaacacctgctgctgcagaaacaccaaattcttcttcacaagcttttactaattcatttaattctaatactgataactctttgatcgcttcgatcatttcagctgttgtcaatttagccattttcatatcctccatattcattgatattctgattatttttatactctgccgtacatcatacggctaccccataaaggcatatctgccgggtataaaatgtaattccaattactctgctgttgtctcagctgcttcctctgcaggagcttcagctgtctctgcaactgcttcgccatctttttctgcgatctgtttgataacgcgagcgaagtttgtaattggtgactgcatacttccaagtaatctggaaagcaatacttctctggatggaatcttagccagttctgaaagtgctgccacatcataaactgttccttccactacaccaccttttaattcaagcttgtctgctccttttgcaaactcgcaaagaattcttgctggtgctgttgcatcttctttagaaattgcaatcgcgcttggtccttccagacatccttcaagaccttcgaattcagttccttcgaatgctctcttcatcatagtgttcttatatactctgtaagtaacacctgcttctctgagctttttacgaagttctgtatcctgagcaactgtcagtccacggtaatctacgagaacaactgactgagctcctttcagttcttctgaaatcgcctcaacgattggctgttttaattctacttttgccatgttcggtacacctccttattttattgtgcgtgtactgccaaaataaaaacctctgtatccaaagacacagaggtttacaaatccgaaattgaattcgcatacttcctcggcaggcgttttctccttatgccttacggcacctgctgtcttcggcagtcaattgctatattataatagcactttatattgtcaatgtcaacagttttttaaaccagtttcattgggttgatttttacaccaggtcccattgtagatgtcagtgttacgctctttaagtactgaccttttactgctgccggtttagctttgttgattgcatcgataagcgtctggaagttgtccgctaactgttcttcagtaaatgaagcttttccaatcggcacatggataatgtttgttttgtccaatctgtactcaatcttaccagctttgatatcgttgattgcttttgttacgtccattgtaactgttccagccttcgggtttggcatcagaccttttggtccaagtacacgtccaagacgtccaacaacacccatcatgtctggtgtagcaacaacaacatcgaattcaaaccatccttcgttctggatcttcggaatcagatcttctgctcctacgtaatctgctccggctgcttttgcttcttctgcttttgcatcttttgcaaatacaaggatacgaacttttttaccagttccgtgaggaagcactactgctccacggatctgctggtcagcgtgacgtccgtcacaacctgttctgatgtgagcttcgattgtctcgtcaaatttagctactgctgattttttcactaatgcaactgcttctgctttctcgtaaagatttcctctttcgatcagttttgcagcttcgatatatttctttcctcgtttcatttcaaataacctccttgtggtattggcgggaacgtgcccctcccactttttcgtgaatttacatataacatagattgtctcttcctccttttcgaagacaccgaaaagaattgttcagactttcttaaatctctgcttttttatctggcagttatctcttactcttcaaccactacacccatagaacggcatgttcctgctaccatgctcatagctgcttctactgttgcagcatttaagtctggcattttcatctcggcgatttcctgaagctgagcttttgtgattgttgcaacttttgttttgttcggcacaccggaacctgatttcaggttacatgctttcttaatcagaaccgctgccggtggagtctttgtaacgaagctaaagcttctgtcattgtaaactgtgataacaacaggaataatcaggtcaccctggtctgctgttctggcattgaactgttttgtaaattcaacgatatttacaccgtgctgtcccagtgcaggacctaccggtggtgctggagttgctttaccagctggaatctgtaatttaatatatccttctactttttttgccatttttcattacctccttgtggtattggcgggatcttcatccctcccacagttttttaatccatctttcttacttctgagaaattcagttcaaccggagtctctcggccgaacagctctacattgatcgacaggctctgtttctgttcgttgatcgcctggatcataccaacagtaccttcccatgctccgctcaatacggtcactgtatcgccaacctcgaagtcaactacgatgtcttcctgtttgattcccagatttgccatttcctcttcttccagcggaaccggcttggatccaggtccgacaaatcctgtcacacctctggtatttcttacgacataccaagtgtcatcattcatgatcatatggatcaggacatacccaggaaacatcttcttctgacttgctttctgaacaccattctttaattccacgacttcctgcatcggaactctgacttcaagaatctggtcctccaggtgacggttctcaattgtcttatcaatgtttgcttttactttgttttcatacccggaataagtatgaactacataccattttgcatctgacataaaatcacctttccgcttctgaccagctattttatcagaaagtcaatcccgtatttcatcagtacatcgatcacagagatcaatgcgcccatcaatacagaaacgattacaactgcagctgtctgctttgcaagtgtgttcttatccggccagacaatctttttaaattcggccttcattcctttaaaccagcttgacttctgagctttttctgcttttcctgtctttccactcatacatccacttccttccaacgattatttcgtttctttgtgcagtgtgtgtgatttacagaatttgcagtacttctttgtctccatacggtccggatgtgttttcttatccttagtcatgttgtagttacgattcttgcattccgtacattccaatgtgattcttgtgcgcacaacttccacctcgctttttatttactttttacatgttactttgatggctgcgaccccatctaattttaggcataaaaaaaagacctacttccattcgccagaaaattgtatcatatggcaatagggaagtcaaggtgtttcttctttcaatttacatatgaaaatttatgaaaatttatatacactgaaaactcttcctattttaaataccctgattttcttttttggagaaatacttttccctctgtcattcaatattttatcgtttttttattgattttgtccattaaatatgtataattgtggtagggatattgtaatctctgcatcaacagagcattactctattactatataagaaaagaggtttaacgtaacatggcacagattgatttaagcaagtatggcattaccggaactacagaaattgtgtacaatccttcttacgaagtattattcgaagaagaaacaaaacctgaactcgaaggttttgaaaaaggtcaggaaagtgaactcggtgcagtaaacgtaatgactggagtatatacaggacgttcacctaaagacaaattcattgtaatggatgagaactctaaagatactgtatggtggacttctgatgaatataagaacgataaccacccggcttctgaagaagcatggtctacagtaaaagacatcgcattaaaagaactctctaacaagagactgttcgttgtagatgcattctgcggagctaacaaagacactcgtatggcaatccgtttcatcgttgaggttgcttggcaggcacactttgttacaaacatgttcatccagcctacagaagaagaattaaaagactttgaaccagatttcgttgtttacaacgcttctaaagcaaaagttgaaaactacaaagagctcggacttaactctgagacagctgttatgttcaacatcacaagccgtgagcaggttatcgtaaacacatggtacggcggagagatgaaaaaaggtatgttctctatgatgaactactacctgccgctgaaaggtatcgcttctatgcactgttctgcaaacacagacatgaacggagagaacacagcactcttcttcggactttcaggaacaggtaagacaacactctctacagatccgaaacgtcttctgatcggtgatgacgagcacggatgggatgacaacggagtattcaactttgaaggcggatgctacgcaaaagttatcaaccttgacaaagaatctgagccggacatctacaatgcaatcagacgtgacgctcttcttgagaacgtaactctggatgcagaaggaaagatcgactttgatgacaagagtgttacagaaaatactcgtgtatcttacccgatcaaccacatcgagaacatcgtacgtccggtttcttctgcaccggcagctaagaatgtaatcttcctgtctgcagatgcattcggagtacttcctccggtatctgttctgacaccagagcaggctgaatactacttcctgtctggattcacagcaaaacttgctggtacagaacgtggaatcacagagcctacaccaacattctcagcttgcttcggacaggcattcttagagctgcatcctacaaaatatgcagaagaacttgttaagaaaatggaagcaaacggagcaaaagcatacctggtgaacacaggatggaacggaacaggaaaacgtatctctatcaaagatactcgcggtatcatcgatgcaatcttaaacggagacatcgtaaatgcacctactaagaagatcccattcttcaacttcgaagtaccaacagagcttccaggtgtagatacaaacattcttgacccacgtgacacttatgcagatgctgctgagtgggagacaaaagcaaaagatcttgcacagagatttgttaagaactttgctaaatacgaaggaaatgaagctggaaaagctttagtttctgctggtccggaagtttaatttctaattttcataaaatcagagccaaagtaaacgcaatgattgcgtgagctttggctctttttattttactcaacacttcgtctatatcatgttgtatttgtcttatttttctttcttagaaagttaattcttatacattgtgtccaaaaaccatttaactttcttttaaatctgatgtcgtctcccggagcagggaagaccaccactctgactaaaacaatagatgctatgaaacatgattttcgcatcggagtcatggaagctgacattgacagcgctgtagatgcagatacgatcagcgaaaccggagccaaagtcattcagctgcacacagggggaatgtgtcatctggatgcagatatgacaaggcaagggcttttggagctggataccagtgatgtagatcttgccattttggaaaatgtgggcaacctggtctgtcctgcagaatttgacacaggcgctgtgaaaaatgccatgatcttaagtgttccggaaggagacgataaaccactgaaatatccactgatgtttcaggtatgccagtgccttctaatcaacaagattgatgttcttccttattttgactttgatctggaagaatgtaaaaagcgggtactgaagctgggacagatgatcactgaccgtgtcggtgtgaaagtcacagtggaggatcccgagtattggggactcgcggaagttctgactgatgaaatggcagaggtctgtctttccatgaaggtcagaaaaccaatgacactggaacagattgcccgaaaatccggcaaagatccagaacgtgtgcaaaagttgctggatgaaatgtccgtgatcggcatgatcgaatataactgggagaacgccgaccatcataagcagtatgtcctgccgatgtttgttcccggctgcgcagaatttatgatgatgaatgacaagcaggtggaagaacacccgattctggcagatttctttgaaaatatgtccagactgcctctggaaaaggtcacaccaatggtactgccgggaggctccggaatcggaatgcatgtcattcctgtagaaaaggcaattcctgcaaagcaggaatccgcaagtgtggagcatatctcccactggctgaaaaaatatcaggacaaatatgcagtcggcgcctgttcctgccgccgtcagcaacgcgtgcgcggcgaaggctgcggcgaaatcgaaggagatctgtgcatcggtgtcggtgatatggcagattatctggtagaaacaggaaaaggccattacatcacacaggaggaagttctggaaattctggagcgcgccgagagaaacggatttgtacatcaaatcaccaatattgacggggaagataagatcttcgccatctgcaactgtgcacctggtgtctgcaatgcactgcgtacatctccttgtaagactgcctgtcctgctcatcttcccgtacagggctatattaagatggcggctgagggacgctatcttgacgcattaaaactgatcaagaccgaaaacccgttccctgcagtctgcggtgcaatctgtaaccgccgctgtgaggatgcatgtacccgagcgaccattgatcaggctgttgctattgatgagatcaagcggtttatcgcagaacaggagttaaaggaaaatacccgctttgttccgctttgcgagaatcatgaaggaaaacaattcactcagaaaattgccgtgatcgatgccggtcctgccggaatgtccgccgcctactatctgcgtacaaaaggatacccggttacgatttttgaaaaagaatcccgtgcaggtggtatgctgatgaatggaatcccatccttccgtctggaaaaatcagtaattgaagcagaaattgacattttaaaacaaatgggaattgaattccgttacaacgtggaaatcggcaaagatatcacgatccctgaactccgtgcacagggatatcaggcgttttatattgcgatcggtgcacagggcggacgaaaaaccggaatcccgggggaagatgcgaaaggcgtgacaaccggtgtggaatttttacgcagtgtaaacctgaatgaagattctgttcatctgaatggccgtactgtggtgatcggcggcggaaacgttgccatcgacgttgcaaggaccgcgcttcgtaccggaagtgagcttgtctccatgtactgtctggaatccgaggcagaaatgccggcagcccgtgatgaagtagaagaggcaaaagaagaagatatccagattcagtgcggatggggaccaaaagaaatcctcactgaaaacggagctgtaacaggtatcgtgttgaaaaaatgtatctctgtatttgatgaaaatcacagatttgctccggtctatgatgagaatgactgtatcaccgtggaatgtgaacacgtactgctctccatcggtcagacgatcctctggggcgatctgctcaaagacacaaaagtggaacttcgtccaaaccagaccgcacaggcagatcctgtgacctaccagactgcagaacctgatatttttgtcggcggtgatgtctttaccgggccgaaattcgccattgatgcgattgctgccggaaaacagggctgcgtatctatccaccgctttgtacataaaggccactcgctgacacttggccgtgatctccgtcagtttgtcgagcttgataaaagcaaccttgacatcgaagaatttgacacggccaaaagacagataccgggtaaaaaatccggaatcacaaaagaaaccttccgcgatctgcgttcttctctcacagaagaacaagtcaagatcgaagctggccgctgtctcggatgcggagcttctgtcgtggatgaaaataaatgcatcggctgcggactctgtaccacaaaatgcgagtttgatgccatccatttaagccgggatcttcctgaggcaagccggatgcgtactgcagaagacaagctaaagggaatccttccttatgcagccaaacgtgccattaagatcaaactgaaaaagaaatcataaaggaacacattatgcatgagttgggaattattgttcacattacaaaaacgcttcaaaatgttgcaaagaaaaacaatttaagcgaaatcggctctgtcactctggaaatcggggaagtgagcacaatcgtccctgattatctgacagactgctggaaatactaccgcaaaaaatttccgctgatcgaacattcagaactgaaaattgagatacttcctgccactacctactgtgaggactgccgccagacgtatcctacagtggaattcggcagacagtgcccatattgtaaaagcccgaacacgtatctcgtatgcggagatgaatgtaatatcaaggaaatcgaagcacaataaaaggaatgaaaagaggaaaaaaatatgttatttcacgtttatggggaaaatgccttgccgcagtggatcgccatgcttggcgtactcgctgcactgattctgttaaatgaagttgccagatgaaccaaagctggcggtattttcatgttttttgtcatcccggctattttgactgtttattttattgcaattgccgttggggcaaaaacaggagcttcctgggcactcaataaccagacatatctatatatgaacggctggttccattacgccaaactctatgccgcactggccggatgtatcggatttatgatgatcaaatacgaatggggaatcggaaaagctcactggttcaaagcgtatccgtttgcaatcgttgccatcaatattctgatcgccgttgcaagtgattttgaatctgccatcaacggatggtattcctggtggctgtcctctgaagatgtatggctgtacggaggatggcacaacgtatttaacggaattgccggaatcatcaatattttgtgtatgaccggatggtgggctgtctacacatccaaagacaaaaaagacatgatctggccggatatgatctgggtttacatcctggtctatgatgtatggaatttcgcctatacctacaactgtctgccgacacattcctggttctgcggcgttgcacttctgcttgcaccgacaatcgcagcactgctctggaacaaaggcggctggatcatgaaccgtgccaacacgctttgtatctggtgtatgttcgcgcaggtattccctctgttccaggagacattctctgacggaaaacaggtattcccatgggcaaccattccaaaactgtatgctgacggtactttaaacggaatcactgccggcggaagcacaaatgcagatccgaccatgatgacgattgtcagtctccttgcactgatcgtaaatattgtagcatttatttacattataagaactgcaagaaagaagaaaaagaatccttacaaagaagaaatctttacagatttcaaatactacaaggatgcagctgcaagagctgagattaaataagaaacaaggtcgccccgcaaaagctctcttccacttttgcggggcgaattttatctgcttttttccagttccttttgaattttttctaccatttcccgatacacatcttccgctcttaattctgcatatacgtcctctgtctccaacagccacagaagattttccagtagatatccccgtttcggtgaagtactttcattccattccagtttgtcaaagtaaattggagtctctgtctttcttccttgtacaatattcagataccccataaccagatgcttcagttctgaaagtgcctggtcttttttcccctgcttcaccagaattccaagtttcatctgggataccataacattgactcctccgagacggctttcttcaaataaggtctccatctcctgtgcggcatccagaaatcgaaacgccttttcatactcactttcttctccggcaattttcgccagactgaccagagacaaacctgcattgcggatttcttcatacaaacaacgctgtgtcagtttttctgatccttccagttttcccatctgatacaggatactggacttcatgcttcttgcatcaaaatccggctgcggcagtttttctacggcttccagccctttttcatattcctcattcatacagtataagccagataaaacataccatgccgtctcggaaatctccgcattttcgctggctgtgctctcttcaaacaacgtaatgcttcgttccatctgctgcttcaaaatttcttcctgcaaacttgcacctgcatactgcatataagtcgaagctacccgaaatttcagaaataagtctgtcggaaattctttcagaagctcttcacagtactgctgtccttcttcccagtttcttgtcgaaaacagtgtatccgctttctccatccgcttcatacattcttcttccgtcatctgctcctgaaagtccagcagaacatccacactcacgcccaaaagccttgccagcgggtttaggattgtaatatccggatatgtcgtatccgtctcccacttggacactgctgccgctgaaatattgagtgctgctgccacctgttcctgcgtcagtcctttttgctttctaagatcttgaattcgttttccaattttcaattccatccatctgcacctctcttttctctgatcttttgctgcttttattgtatcaaagaaaagaaaactctccaatggatggagagttaacttttgctgtcagttttttaactgtttatcctgtttttataagaatggtttcaattctttcatcagctgttcgtccatatggagcagcttctttgcaagcgaacggctctcagaagacgcctcttcatactcattgagaaattttccgatggactggattcccatattacagccatccatcagaagcttcgcaatctgagagctgtcatcgtggagcatcagcttcacatccgttgtaatcctggaaaatgcagctgcggcaggatgaggatccttttcttgttctccatgtttttccagcagtctgctgatatcttcctccagtgctttatgtttcttgtcgtattcatccagcagctgatgaagcttttcatccttcacaaaatcccgcacctgattcaggctgttgatcgccatcttgcagccactgctgcattcttttaaaagctttcctgtctgttcttccatatcatttccccactttccattacaaatcatgtcttgtttattctgtccaaaagtgcgaattctattcctttatcttacaacagcacgtctgattttcggccctatgatgcaagcaagcacaatttttaccagatctcccggaatatacggaaatactccgacaccaagacctgccacaaatccgatattcaactgcatagaaagccagattgtaccgaaaagataacatacgatcgttccaagtaccattccaagaacggcaaatgacagttttcctttaaaatgctccacaaaaaatccggcgatcactgtcaaaaacacaaatccgaccagatatccgcccgtaggacctgccacttttgccggaccgccgctgaaaccggaaaataccggaagtccgaccagaccgatcaacaggtatacaatataactgatggtactgaattttgttcccagtacaaaaaccgagaaatacaacaccaggtttgtaaatgagatcggcaccggactgaacggtagaggaatacttaacggccccagaatgcaggtcagcgctgtcatcaatgcgatcagtgtcatttgtttcgttgtgagaaattttgcttttgtctccatgtgttttgttctccttctttacactcttgttccagtatacgaaagagacgcttaattgtcaaccttttattattataagttaacatttatcctgattatttactcttgcagctgtatatgctagaataaatatccttactatgatcttggggagaaccgatatgaatataaaacaaattaattttctgcgtatttttaaaattgctgcagccgcgtccatcggatgtcttcttgcagtactattccaactgcagacaccaacttctgccggtattattgccatcttaagcctgcagaatacaagaagggaaaccttttctcttgtcgccagacgtattttttctttctttccgtccatgactgtggctatagtggtattttatctgatgggataccagattccatccatttttgtctatctgattttgtttgccggtatctgtgaattattttctctgcaaaatacactggtttccaacaccgttttggtactgcacctgtatgctgcccagtctgtgcatcccgcactcctggtcaacgaactgcttttgcttctgaccggaacttcctgtgggattctgatgaatctctacatgcccggaaattcagcaaaaatccgacgggcacaatccgagctggaacagatattccggaatacattccaccggatcgcccgtgatattgtgatggacaaacaacttgcctgcaccttttttgatctgtccgatctggatttgattttaaagaaactggaaaaagaggcgcacgaaaatcagggaaatacattactgtcagatgaacagtattttgtgaaatatgtagaaatgcgaaaaaaccagaagctggtagttgaaaaactctgtcagaatatccgacttttacatgatgttccgattcaggcgcatgccatctctcattttatcgaagatgtcagtataaaatttcatgaatccaataatacacaggaactgatgcagaaactgaccgaaatgcagacttccatgcaaaaagaaccgcttccagtgacaagaaccgagtttgaaaaccgtgcagttctctatcgaattctctacgatctggaagaactgatcaccattaaaaagcgattcatcgagactttaactcctgatgagatcaaacgattctggaataccagtcaaaactgctgtcaatagtagcagttttgactgcacccatctgggaacaattcctgtttcatacgatcccggaattctcttttcgtttccgctgtttccaaaatcataagcgcttttttcaaccggatgatatcctgctgcatgaattctgtataatttcctctgcccacaatcttcaaatatgtaattcccgctttttgtaggtcgtacagcgcacacaatccacatccacctgctcctgtacgatagttttccacatccaaatcctcattttccacttcatctgctttttgatttgacagttccagaacgcccttacactttttgttcaacttccccacgcgatatggaacccgacagagatgccccagttcatcacagtgcagcgaattgcagaatcctccactgaaatggcacagttcatttaggacaaacgcctcgtacccgatattcttttttagattggaaatacaggatttcatatcttccactgtatttttgcggtgaaagatcacccggcagatttccatttcttccagaaaatctgccatctggctgttgatctctccaaattctccgctcaaatggatccgacaggggatcttctgactgcggatatacaaaagcagcgccggatctgccacaatgatcgtatcaaatcctgcctgatggcattgtccaatgatctcccccacaacaggatactgctcgggtgtataagataatgagttgaacgtgatggctaccggcacctgatagtatttcctcatatttccaagaatcttcaactcttcataagaaccgatctgcacattataagcgcgcacttctcgtctgtttaatggatttagcactccatatttttctgcccacacaaatggaacatacccgcagaaacattcatctgcccctgcctccacatacattggataatcatccacacttccaagccctgctgtaatcttcatcttcacgcctcacttctcacaataggtttaccacaatccggtcaatgccttgtctgacagattgattcagatactccatctcttccagactcgttctgtcatatccaaacagtgtgttatactttccaaacatctccagatgcctgggatataaaaataccaatcccctgcagtatccggggcactgttctacagatttctgtctgccacggtctccacatgcgcacttcgcatacagtgtacaaaactgtgctgtattggtctgaaaaaacggcagatgcaggctatgttttccttttggaatcacgatctcatgtccgcaggcttccagttcataccgctcaatctggttctcttttaaatattgctgataaaattcactgtttaaattggtctcctgaaagcaatttgtttcctctttcagataacgggaccgattgtcctttttgtaccggttcaaaagaatacccagattcagtttcacacagttttgcgtttcctgtttccatttacggatcagatgtgcggtgccccagtcatttactgcaatctcattcggcatatattcttttctctgttccagaaatttcagcaattctctgattgaatctatctgactctctttgatccacgaaaatgtcagtgtcactgaaattccttcaatttttgccttttccaacatggcatgtaatatgtcattctccggaaataaatgaggacaaaacgtattgcctatataaacacgttccaccggtttcttcgcaatcggatgttcctgcaagccccattttttccagtatttttctgcaaatgtttccatcggttcccttagccacgcttcatataactgcggagtatccaactccagagccagctctacattttcacacagcttctgcccttttgctttctctgctgcctcctgaaaccactcctctttctgctcttccagagattctgcatagtcttcatccagatgaacagggtaatccgtgtatgctgccgcgacttccccgtcttcccctgtcattttcaaagaaatatacttccaataatcagcaagtaattgacgcacatatttttgatagtctttgtcttctgtcaataccgtatattctgtaaaaaatcggctctcctccatttttttcatccggtctgcaggaatcagaagcttcttatagcaccctccattttgcgaaaaaaactgcagccagatttcatggattttctcagcctgatttgccatccgaaatacaaatccgttttctcccagctgtgtgatgcgcacttcctgtccatcgacaattcctgataacagaccatagggaatcatggaaactgcatttttaatctgcattctgtgtcctcccaaaccttattcttagtataatgttactttagccgattccacttctattttcaatcattttgtacagttttctcatctgaaatagcctttttctgcctgtcagcagactacaattttacattgactttattccggcaacaggacttacaatcaacataagataaagagttcctggctatactatggaacataatgtttcaaagaaaggatatgattttatggacagaaaaataagaatcgcacaatacggatgcggaaaaatgagtcactatctgatgcgatatgttttagaaaaaggcggagaactggtggctgcctttgacatgaatcctgcaatgatcggtacggatatcggcactcatcttggaatggaaaaacttggcataacgatcagcgatgctaaagatgcttctgaaattttaagcaaagaaaaaccagatgtatgcattatcgcaacccgctccactatggccgaattaaaagaagcattttctgtatgtgcacaaaacggaatcaacgcgatttctacctgcgaagaggcactctatccgtggaactcttcaaaagaaattacagaagaactggatgcacttgccaaagccaacaactgtacattgtgcggaagcggatacccggatatgtactggggttctctgatcacaactctggcaggatctatgcatcgcattacaaaaatctgcggaagcagcagctataatgtggaagactatggaattgctcttgcagagggccatggcgccggattaaatatcgaagatttcgaacgccagatcggagcatataataatctggattatcaccagaccttgcaggcaattgatgagggcatcgtcgttccatcttatatgtggaatcagaacggatggctctgcagccagctcggtcttcacattacttcacagacacaaaaatgtgtaccgatcacgcatgacggagatttgtactccagtacgctgaatatgacggtaaaagcaggggatgctaccggaatgtccgccatcgttacaacagaaacagaagaaggaatcacactggaaacacaatgtctcggttatgtctatggtcctgaggattttgataaaaatgaatggagcttccacggtgaaccggatacaacggtgatcgtaaatcgcccggcaacagtggaattaacctgcgccacactggtcaaccgcattccaatgttgatcgatgctcctgccggatatattacaacggaaaaaatgccggtcaaccactatctcacaaaatccatgcatgaatatgtaaccggaaaataattttatgtgcttgcacagcccgctttttcacgaaatccgggctgtgcaagcacaagatccagaaacgctttcatctgtggtgtcatccatttgttcttgtgatacaaaagctgatggtacatcttcactcccggcaaatccgtccgtatctcgaaaaggacacctttttctatttcttctttcacagtaaattccggcaaaaatgatatccccatcccccgctttagcagattgataatcgtttctgtattgccgatctccaaaaccggtacaatctcaatctctttttctgccagcatctgctccagttcatatcgataggcggctcctgtttccgtgagaagaaatgccgcttttgcaagatgctgtatcagatgaatattacttttttgtgcaaataccctgtctgatgtcacaaaaatcgtatcttctactctttctgccgcacacatccactgtgaactgtaaattttcttatccagcgtgaagatcagatcaatctcatcacttttcgccagatccatcaaattttctgtagctccggacttaatgatcacttcaacttccggatacagtctgtgatattgaagcaaaagttccggaagcagtgccgtacaggtagattccacgccgccgatcttcaatgttcctcttgtcgtatgctcttcccctgcaaatgtcaatgcttcatttgtcacccgcatgatctcacttgcatagccaataaactcctgccctttttccgtcagatatacacgctttccaatccgctcaaacagctgtgttcccagctctttttccaactgctgtatctgaatggtcactgcggactgggagtaccccagctgctctgctgctttggaaaaattctgggtgcctgctacttttagaaacgtcaaaatatttctgatttccatccgtctctcctcattaacatttttaatatattatatgaaatctatgaattttacatatatgtaaatttagtgtagactatcaaacgaaatgagtcaagtaattaagaaaaagaggaatacctttatgatcggaaccgaatatattttaaacagtacccagttggaagaggccatcaaatcatttgtgcatgatttttgtgcagaaaaacacgagatccacgatcagcctgttgttgttgaagcaaaggaacatcaggaggacaaaatcaaacagatcaaaatcccggaaaaaggacgcccggtaaacgaagttgtctctgaaatgatgaacgaagtgtaccgctaccgcggagatgccaaccatccacgttttttcagcttcgttccgggaccggcttcttcggtttcctggctgggagatatcatgacatctgcttacaacattcatgccggcggaagcaaacttgcccccatggtcaactgtattgaacaggaagtgttaaaatggctggcaaaacaggtcggatttaccgagaatcccggtggtgtctttgtaagcggagggtctatggcaaacatcaccgctctgactgccgcccgggacaataagctaacagatatcaatctccatctgggaacagcttatatttcggatcagacacacagctccgtcgcaaaaggactgcgcatcatcggaatcacggacagccggatccgcagaattccgacaaactcccatttccagatggatacgacaaaactggaagaagccattgaaacagacaaaaaatccggctatatcccgtttgttgtcattggtaccgcgggaaccacgaacaccggaagtatagatccacttacagagatttccgcactttgtaaaaaacatgatatgtggtttcacattgacggggcttacggtgcttctgtactgttaagcccgaaatacaagtctctgttaactggaaccgggcttgctgacagtatcagctgggatgcacacaaatggctcttccagacgtacggatgtgctatggttcttgtaaaagatatccgtaacctgttccacagcttccatgtaaatccagagtatttaaaagatctggaaaatgacatcgacaatgtcaatacatgggatatcggaatggagctgacccgccctgcccgcggcttaaaactatggctgactctgcaggtgctcggaagtgatctgatcggatctgccattgagcatggattccagctggcagtctgggccgaagaagctctgaatccaaaaaaagactgggagatcgtctcccctgcacagatggcaatgatcaacttccgctatgccccaaaagatctgacaaaggaagaacaggacattttgaatgaaaagatctcccatcggatcctcgaaagcggttatgcagcgatatttactactgttctcaatggaaagaccgtacttcgaatctgcgcgatccatccggaagcaacacaggaagatatgcagcatacgatcgatctgttggatcagtatggtcgtgaaatttatacggaaatgaaaaaagcttaatttaaaaaaccatggaagtgacgggaacttatcccgttttccatggttttttcttatctcttcacaaagtattcctcataccatacaaggaatgtataaattgtccacacttttctccagttatccgagtttcctccgatataatccccaaaaatcgcattgatctcatccagattgaagaatttggctgccatctcgctgtggaacttgtcacgcacatcctgattgtatcgctcatccgccatccagatacggatcggcacaataaatccaagtttcttgcggaatgcaatttcttccggaagcacttttgctgccgctgtacggaatgcgactttgttctgctcctcgttgactttatatctggacggcattctggatgcaatgctgaaaattctggtatcagtcagaggcatccgaacttccagtcctactgcccggctcatcttatccacgttcagataaatatctccttccagccagatctgaatatctacattggacatcttactaagtggatccaatccttccatctcctcataaatacttcttacgagttcgattggaagcacatcgggatcataatgtttcaagattttctgcttttcatcctctttcatgatgttcgtatttccgacatagaaattcttcagattctcgccgtagcgttctgcatttcgatacatattgtatccaccgaagaattcatccgcaccttctccggaataacagatctttgtatgctttgcagtctctctgcatccaagtgcgaatacaattgccgaggcatctccaagcggctgttccatgttgtacattacatccggcacaataccaaaatattcctccggtgtgatcacacaacgctggctctctcttccaagaagctctgctgtctgtcttgcaagtccggattcgtcaaatcgctcttcttcatatccgcaagaatctgttttctgcacatctgacattgccagaacatacgaagaatctaccccgcctgacaagaacgattctgcatactcactctcttctttcacttccggcataatctctgtcagtgtgttgtgaatctcatcagcccagtcttctaatgttttagtctcatccgggtggaattccggcttccagtaacgggtgatcgcaagttttccgtctttccagatcagataccgtcccggaagaagctttttgacacctttaaaaaatgtcatctctcctgcaacataggtaaggcttaaatataactgcagcatctcttcgtttaattcttttacaaatcccggctgctccatgatctgacggatggttgtcccatataataattcaccatctgctgtctcataataataaaacggctttgttccgaactgatctctcaaacagaataattcctgtttctcatcatcccacaaggcaaaggcaaacatcccatgcatatggtctgccatttcatttccccatgtctcatatgctttgatgagaatctgtgcttctctgtcctctctggataaagaatgatcgatccccagtcgttcgcaaagcgctgaccagtttcgaatgtgtccgctgtattctttcacgtttatcatgtgtataccctcttttcttataatttcaataagaatattcgatcggccggtatgccgatcctgattttctggttcctgtttagtttaccacgatatgagcgattcagctatgattttttgctgaaactttacattgctaatatcttcttttatatcccttatcggacaaagttcgcccgccgaaggcctgtgttgagggatgcccggatggatatacactttggaacatattttattaaattaccttattttcaaaatagcattccgataaatacgatggattttcataatacatactgctattataatcatcaattttaggactgataaatgaattgtacacctctatcaaagcatctattgtttcaatcccgctctttttcgcaacttcttttatcagccttttatatacttttcctatatcccaatgagacggaatcgaataactacaatctttcacattatcaaaatttcccgattcaatatcggcttctctaataaaatcatcgctcactcgctctatattgtcactatgatacacatcagccaaatcataaattttttcaagtctttttttccccaaagcattcacaacatccgctcttgtattccgggttttacgcgcaatgtagtcaattattttccacagcaatgcttatacttcttcccgcttccacatggacatggatcatttcgcccgatttttttcttcgtgacctgatttgatatttcaggcagacctatttcacttggaataatcttttctttgccaagttcccggtctgtaaatccgcgattactccatttccggactgaatacacccattcactgcagttttccacaaaatgatttccccttgtacgatttgggaattcaacatatcgctcaaacaagagattcataattcctgcagcattcaaatcttcctctgctactctatattccaactccaacatcagattgtctgcccgtgtcttgtttttcatcagatgtgtcagatctgccagaattttcttataaaatggattttttacatcaaccagattctctgcatataattttatctctttttgattcggaatatagtattcctgacctgatacctgtcgtaaaaatttcctgtactctttttcattttcaaactgctcactgatgatccactgttcatcacaccagaatggaccgtctgcacgttcacacagtatatcgactgtttcctttagtttctccggaagccactcaagctcttttctctcttcttctgataaagatggatattcaagcatctggtttagtgcaatgtcctccacctttgctctttctacaatcccaaacaaatttaaacacgctcgcatggaaaggcggacagcggcaataagaccaagtatattttgcaccttatccgtctccagatttttgatagtaaactctctgatctcatccggaacaacaaactgcactccatccacatcacagaacataaatacccagccttttttgcagtagttttcttccagagccaacatctgcatctgagaaagtggataaccattcatcgtccgcagcatcgtttccatgtcaaacttatccagataaataaattcattctgaaacgaagttaaaatcaactcctgcacatacttttctttttctgcccgcaatttaggagcttcctcctcccagttttccagaattacatccagcagagattccggcgcccggcttagcatctcgttcagatccgttgtcgttttcccctctatcataaaattcgaagtgaatgtctctgccatttgctcaaatatattttcatcaattcccagtgcgtcaaaaaagtcctgcatttcactttgtttctgtaatttcatctcacttcacactccttgtgatccactcattttttttcgggttccaacatatccagcatcgcctcctgatacgccgctctttttctcttctgcatctgcattttcacttccagcaattccgggagatatactttctccagttttttcattctcacttcgctcagatttacatccgacagatatctttcataccagtctgcccggtaattccagagacagatactttctccataccgttctttcaatctctgcgcaatcagaagcccctccggatcaaaatcaccatgataataaaaactatgattttcctttagaaaatccagcagaagaagtgttgcaagtcttggctgtccatttccacagattgctgcacagtccgggtatttttttacaaaaacagaaaatactgccggattttcaaaaagataaattttctctctttctgcatgcacccctccaaacgtcccaatcgttcgaagcgtcaggcggactggttctctttcctgaaaaaatccttcgattcctttatgaagatttccattgtgtttccatgctcggattccatagacaagcgtatcatttgacagatcatcttttaaaatacccgccctgtaaaaaatctgttttttctttccgcttctgataattctctgtctttcgtttcctgccaacaggcagaaagaatgataaaaagcaatctttccgccactgtgcttgcgtcaaaataatgaggatctcctgtcagctttgccgcaaataccggtaaaagttctttttcttccattcgcggaagctgttttactgcctcaaacacatatctcaaaatttcccgcagaatttccggagcactgttgtattgctgctgcaaaatttcatagcctgttgtgtgctctttcaacgtattctgaagccatcttcctcctgtcgtgtcctcatacccactttggacttccgcaaaaaaggcatctctttcttcctgtttctttcgcctctcttcttttttcaccgtcagctttttcccaaaataagcatccagcaattcctccagagaaatatcagaaaacctgcttttggacagacagatttcaaaagcttccgctgatatggtaacagactgattctcggtgtaatccttctgcaaaaatccgcccaattggctcttatcctgaaggcttaacccggtcaataccactttcccgcctatatgtccgaggctctcatattttcctctcattttttggaagactttttcatacacagggcgctcacgaaaatactgtaaacactcctgcatcaacttctgtttctcttctgctttcacgattcctctcctgtaagcatcacctttacttttccattccagatatagcggatcactgatacgaactttgcattttccggacggatcaactgataaattgcaagccccggaactgtatcgtaatcgccccataaaatctgagaattgatcataaagttgaattcaaactcgaccatcagacggaacatatccctgatattggtctcatcaacaccggcaaacgcttcatccagtgaaatcagcttcggcgcatccggacgtgcccccgcatattttgccaccactgccgaaaaaagcgggacatacattgccattgctttctcaccgccactaaacgtaaagaatacacggtctgtcaattctttctttttctctcccgttttctggcattccaactgaaattcaaaccattttcgataatccagaacttcccgcattgtggcatggaacgattgaaccgatcccatatccccggaaatttttctcgcttcttcaattttggaacggaaatgcctggaaagactttctacctcttcctcacgcataatttccacgtctttttgcaataattctaccaatgctcttgtatccagctgttcttccttttctgccctcttatttttccatctgagactcagctttaatccacttgatgtctgcatggattccatcagtgtattcattttttccacccagcgcttgctggcctggatctttccacgaattttcttactgatcgtatttgccagaatatcttcaaacaattctctgtcccgatcacttaaaagacgttttaatacttcggcatcctcattcattttttcaatcagttccttaaattttaccggcattccacggtattttgccaaaatatcaattcgcttcaccgttacatccagaaaactgccctctccatccagctcttcaaacagggactgcagtgtgatctggtaatccagcagatatcctcggttctgatgataggcttcctgaagacttccaaacagatcgctctgcttcttgtttccaaaacttcctgcaaaccggctgcagatctttttcgcctgatcttccaaatcctctgtaacaacaaatactcgctctgcatacccaagctgatattcctgttcaaatacattctgatatttttcctttttctcaagcagttccttttgtctgaattcattttctctttctttttcctgcagtacttccgtctcttttcgaagtgccgcctgattcctgacacaggtctctcgttctcccggaagttttccaaggcgttctacacaatgatccagccgttctttgatttcttcataatctgtcagctccagctgcttttgaacggacgcaagaaagccttccacttctctgactttcagacagatccgattgaattcgtaacgaatatcatccaaatcaagctccagttcttccagatagtctctctggctcatgatataccggagactattttgatacttgccatgcgcaacctgaagctgggaaagaatttctttatatctgtgcaatgccaaaaaagcctgtgtaaacaaatccaatcttggcgaaagataacattttccacagatttcccgtacccggatgcgtacctcatccagtgcttttctttctttttctgccagttcctgatgctcccagagtcttttattctttcgttctaacttatattcgcgatcagaaaattcttttgccgctgtctttaaatcttcctctcccgggaatgacttccattctgactgcaatatttctgtccgcgctctgttttctgccaattgtttttctaactcttccacactggctctgagctgttcgcagagtccggtgaattcttctatcttttccttccggtacttttcccttgcacgcaccccgataaagcgcgcctgatattccccggtgatcgttccttccagaacgccgatgcggtaattcccattggcatcaatccaggaatctccgtgctctgcatgtgtatcaccaaatccaatcgcagaaagaatattggaaatattctgataaaacaaaatatcattttccccattctccacttccagcacttcctgcagactttccctgacatgtgccacatcgctgaacagataacgatcgcatactcctttgtccagagcatagacctgttcccgatactccttaggaacaatcagcgcatccagtatgcccatctctagcaatgcttcttccagatgatttctgcgctcttcctctaatatctggtcaaattctatggtcttataaaactggaaatacggaatttttttctcctttagcagctctcggtttgcctttacacaatccggctgttctggttcaggatccttttgatttttccactcttccaactctgtttctgcctgatacagattctcctgctcttcctgcagatttcgctccagtaccattctattctcagaaaactgtcgttccagttcatatagctttggcctggccagttcccggatttctgaataatcgcttcccatttcatagctttctattttccttgagatttcctgcatggtctccggaagaaggtgaagctcctgattttgtttttcccataaatacatctgctctgtcaattctgactttgtctcatgcagaaggttctcatattgctgcatttccttttctgcaagatttctttcctccctgcagacatccaactccagaagacagcgatcatatttttcctggctgttcttttcttccaaaagaacctcttttccctgttctactttctttgtatagtcattcaaaagctggtgatgtgaagaaaaactctgttctttttcccgatcctgtaagatatcattcttcaaaaatgtaaactcatcaaacggaatttcttccagttctgtttccatctcttccagacaactttcaatctcttcccagatacgttctgttttttctgtttctgcttttatcttttcttctgtatcgatctgtttttctttcttttcctgttcctgtttttcttttgtctgctgctcctttactctctccagaagctctgctttcaacttactctcctgctcttttaactgtgccgcatcacttttatccagagaggttttttcctcttttaaaatttcctcttcctgtttcagagcttcataatgctgttcttccttcctgagttcttccatatgaatcgccagatcttccgtaatctgttttccatttttcatacagttctcatatgctttccctgcatctgaaaacagcagcgccttgtcataaagcacaatctgattatactgatcgtataccttttcaatctgccgcgctgcgtgaatgctttcgcttaatgtatccagatttgttttcagattgtccatgttttcgattgcctcggacatcggacgcagatcatcttccgaaagtgtctgaagcgaactgcttaaaatctcattaatcacggtcggcttaaagtctttggaaagcttcggtgtacgcagctggatcaaaagctccagaagctctttgtattcctcttgtgtctcaaaaccaaaaaggaggcggttgacgcactgagcatactctccctgtgtttccatcactttgccgccctcaccgatccggtatttcagttctcccttcgagcaggtaatcttattttccacatctttatacagaaacaaatcttttcccacacgcctgccgtccgtcacacagaaataccaggattccagctttttattctttctcgcacgaagtccgatcccaagtgtcagatattcttcactttccaggcgttttaactccatgtaaagataccctgtgcgctcttctctctcatctccttcctccagaagatagttttccatctttctggcgcgggaaccgaatggatccaaacgctccggacgcatgtttccgtccagcagaagcggaataaagctctgcattgttaccgatttgccggaaccatttgcccctcgaagcagcatacgtccatccagaaaatcaaattcttcctcatcatagtaccaaaaatcgagcaatcccactctgtttatttgccatttactattcatctcttcctccgtttttcaaaaaatcttccggatattttccatagatttttcctgctgttggtctgattttcacatgatctgctccaatttctatcagcatcagctcttccatatatctttccacttcccgataaaactcggcaaacgtcatctcccggtacgtcttattaaatccttctccgaatttttccttgcattcttccacaattgcacgaaaaacttcctttggaatacaaatctgttcatccagtggaacggtaatccttccctctgttactcttttctgtatcagttgatttgtcaaaagaacaacgtcagaaagtgtatttccttccggaaaacacctccccagtctgcactcttctcccagcacgagaaatgcactgctgctgtgtacatgcagttcacagtcaaataattctgccaggtccccctgtatcatatttctgtaatttctcagataggcaaaatcctcctctgattccgcatccttatacattcccatcgacatcagaagctttcggtatactctctgcctgcgcacaattcctctgtcttcattcacatcgatccactcttctttttcaaactcctttgcagatgtgtaacccatgatgtcctgcgtgaagtttttcataaaataccgggatgctcctgtattttcgtataatacctcactggtatcatctttcgcaaatccttcttcacttccatcatccacattcagaattccgacggctacgcagtatttcataaccttgatcatatgacgtctgtaccggtaaactgtccagtcgatctgctcctcctgatactggctctgtacgtattctgtcaattctgacaatacaaattgctcttctgcctctttatcctccagaaacatgagcacaagacagaaaaacacatactcgatcggctctttaaattctaaaatgcccatccagttttccggaactgcaggcatcttttctaccttgatcatatacggattcacgaccacctgatacccgagcttctccatcaggaatttcttctcttctcccgatgaaagctcttctttcacctgataataaagctccctctctctggattttaaaatccatcggcggtttaataataattccaacgttctcattttgattccccatcttcaaacacaattgtataagcaggcatctgaaatgttccatctgtacattctaacatacaatactctttcacatctgcccgttcaatataatacatctgcccgtcttctgtttttgcacgatgattcttcctttccagagcctttgaaagccacagaagaaacatatcccgtacaggtggttcgatcaccggaagacttgcaaactcaagtcgtccgttgtgtatatagctcccaagcagtttcctctcctcttccagcctcctgatcatcagcagccgcatctcttccttctcttttgaccggtcgacgataccgcttcttctggctttttgtttgtaggtgcgcactctgggagtgactgtcacggcatatgcttcttcctcatatacaccactgttaatgctgtctgtctctctgctcaattctcctttgagatggagcggcttctcgatcccgaatacgaccgctgacagtcgatgtgcctcgttgatatccctgcactttccaaatatgtccgccagctttttatattcctcccgccgatttgagccctgattgctcatctcactgattcgtgtggcatatctggtaatcttccggatgatttcgtttgttgtatcaaacacttttcccgcttccgattccatcccgtcttttcctgaaaaccactcggaaatactttcccaacgccccttcattttgtcataaatcatctgctcatcaatctctgtatccattctcggaatcgagagctcatactctgtcactttctgcaaaatctgattcacgacctcccggtcaacacttcggagctgctgctcgatcgcagtcacatttacctggaggctctttacaaacgagcgaaggtactcgatcagccggtctttaaacacaagaaactcttttgttttcatcatctcttctgcttttacactgtttaattccctcatatagtcctggtaattctgattcaaccgaataaaatcactgttcagatcattccaccatccataccgcttttccgcttctgcctgtgacatctcccccagccttccaaggctgatccgaagccgctccaataaagtcggctccagcgaagagccttcgatcaacagattttcaatccgaatcaccattcgctcgacttcaactgctgtctcagaaagctgatagcgaaacttcttatttttaaattcctcaatcgttgtcactttccgggtatcctgaattgtaagcagatttccccaggatgcaagcgccgccaggtcctgctgacactgttccatcgtatattcctgaaaataaggatcttcttttaactcctcaaagacgtcctcctgatacatccaatattttaatttttcatacttcaaataaaaaagccgaatgatgggacgatatctgtctgtattctctacattcagatatcttgcctccaacattggctttctcattttttcttgaattttcatgtcatcaattcctcttgtatttttattcttcatcgacttctgctgttgttatttctgtgttcagaatagcatatcgagattgaatctacaagggattggatatatgtttttgattttttattgaggtgggtggtgtgaacagtaacgagagcagtgtatctgcacagcaggggcaagtaagttttgtattattatttttgcgattcttcctaatgacagctgttacttccgcatccctgctcaccacatgtatgtccttccccgtggctgtgctcatggtgagaacacttcacatccggattataatccagtgtttcattaataaatgcttccactgccttatccgcatctcccaaaactcctccgaaaagcttaatgcctgctgccgctaaagccgtctgtgcgccgcctccgattccgccacaaatcaaaacatctgcatttaatgcattaagcactcccgccaatgcgccatgtccgcttccgttcgtatctactacctctgaacgtactacttttccttcctctacatcataaatcttaaatgtttctgtgtgcccaaagtgctggaaaatctgtccattttcatatgttactgctattctcattataccctctcctttttccactgcatatttttggtaaatctcctgtttgtaacatcctccaaagctgcagctgctactctgaccgtcgcagattctgaaatccccgccctcgattctaagcggatgtccatcaatgagcgcatctgctatttttttcctggcaagctcgtaaatccgttgaactgttgttcttgcaatctgcatagatactgcacactgctcctgactataacctttcttgtccaaaagacgaattgtctcgtactcatctaccgtcagaacaatgggtgtttttttctcagtatcatctgccggaaaaaattctaaaacattggggaaatggcagacttttctgcattttactggtctcggcataaactgctttttctatcgttttacatttaatctgcttttctatccaattatcttgtgcatttttaatgatgtcaaatcatcgctctttttctttatttacatttttcagttacaataacatatccttaacaaatgtattccgatagtcactcggtgatattttatatctttccttgaaaactcggttaaaggttctttgactttcaaaaccacaatcaaaacatatattagttatagtatcctgtgtattttccaatgcagcaactgcataatttaatcgtactccattcacatatttattaaaattacaatgaaaggttttggcaaacattcttgacaatacatatttaccaactcccaaatcgagtgccattttttccagacttatttcatttctaaaattctttgctatatactccacggaattataaataagatcatcacttcctaatgactttttatcaatcatcggcatgtcagtaaatacatatgcaataattatttgcgcataagcctgcgccaatattgaattacactctggattttttgtcaaaaaattgattgcgtgaaccacatccggatgcatattttttttctttaacactggattctcaggactatatgtttgcaattctttcagatatccagatagtactgccggatcaatatgtaaaaaaacgactttgttttctctttctccgaagacttgataatgatgtattacatttggaaacacgattgcgaagtcgccttcattcatatcatatagctctaaccccactccaagtgcaatattaccatttgtcacatatacaatctctatggcttcatgtaaatgtggtggcatgtgtactactcttttccactcgaccgatattcctttgtctctattttcatatactaacaacatttagaaccaactcctttttcttagcttttattttgtcatattgtcccatttttatctgcccatttagaaaaaggacactgcatcgtatgatacagcatccttatcctttctatgtgaaaatagttgttgtaagaacaaattatgcaaacacaaacatcatattaaaaactattcactaatcttgagctgctctatattttttactcccctagttcaatatttatcgatacatcctgtatatcttcattgcaactaacaaatggtaaatgaatatctgatgtcttcttccgcactgatatgatattcgtcttccacatcactttgccagctgtcgatacctccgactcctctgactgctccgtatacgcataaaactgttcttcttgctggtggtaattcctcatgatgcagagcattttcaatttcagatgctgtataaggaaggcatgaaaaagcaaattccttgtctttcttctcaatacggagtgtctgtggtgactgatctgttctactattgtcaagacttgtatgtctgctaatttcaagccactctgtatccattctcattccacattcctgtgggacaaggtaaggtgtcaggctcaaatccgtcacttcataaatacctttttgggcacctgcttttctatccggatatgtctcccctgataatcctttatagatatatttatctgcaagtgttggcatgataaaacgcattccaaatactggaatctcaggcagtccttttactccattataatgtacatccacctggatttttccggatacatcaaccgtatatgtcacaagtaccgttgttgacggattggatattgtctcataagtatattttacaatgatctcatcagcaaaaacatccccaccgaagctgttattgtccggtgcatatggtttctgcacttctccatccatgataacctgtgtttccttacagtcaataaacatatctgctgaaagccagcttccgcttttgatatggaacttgcttcctctgtcgttatctgtcagcgctctccagaaagtaggttttgggcaacggtacagccactcatatccgtttttaacgatagattccagtccgccttgtgcataagaaaaaatataatcaaatccttcaccatgtacaccaagtgtatagtcaccatagaccactcttaatttatctgtataagccatagtaatacctcacttcctgcattgccggtttctcttttctgtcagcaaatacgattccatttgctgagaattcatagtctgaaggtttatcgtcaaagtctccgccatagcgtaaaacttcttttcctgtcaccggatcttttacaagaattgcctgatcgataaaatcccatataaatccaccctgatacatatcatatttatcaatcagcttcatataagatcccagacctcccatggaattacccatgtcatgcataaactcacataatatataaggtttcttcggattgttattcaaatactcctctacatcctccggctttgcatacattcttgtttccatgtcagaaatcgtatcctcatatgccctattgtaataagaactttcataatgaactaatcttccatcttccttttcagcaaaataaacgttcattgcttcaatgtcatcacccgcataagattcatttcctaaagaccagaataaaacggatgtatggtttttaaatgtttcaaaattgtttcttgcacgatcaagtacagcctctttccactgtggaaaagatcccggcacattgcaggatggttcgattgcccctaatttctggaaggatccatgactttccagattcgtttctgccatcacgtaaattcctgcattgtcgcacatataataccacggtatctgatccggataatgacaggtgcgtaccgaattaatattatttctgagcatacatgcgatatctgctcgcatatcttctaatccaatgcatcttcctgtttctggattccactcatgacggtttactcctgtgataaccaagcgttttccatttaaataaataatcttatcaataatctcaattcttctgaaaccaatatcgtaagggattacttctactagacttccatcttccgccttaagctctacatacgcatgatataaataaggatcatgattatcccacagtttaacagtttctagatcagtacaaatcgtaccttctaattggtcattttctttctttaactgtacagatttttctactaacagattttcttccctgtcttttaaaataaaattagcagtgatactctgagcatccggtgcagatactttcatgctgacagatacgcttccacttacattatcctgattcaacacaggttgaaaccatacatcatccatatgtacatccggtatcgctttcaaagtaacatttctaaagattccaaaaaagcggaaaaagtcttggtcctctaaaaatgctgctgtgctcatcttgtgaacctgaactgccagcacatttcccttttcttttatataaggtgtcaggtcaaactcagaaggcgtaaaactatcttctgcatagcccacaaactgaccattcagccacagatacatcgcttcttctacaccttcaaaacaaatatggattcttttcccacacatgctcttatccaggtcaaagtatttgatgtaggaacctaccggattgtactctgcttctgaaaacattcctttttctgctccggtcgcctccatgctgtaagctcctctgtggtactcttttccttcccacggatacatggtgttaatgtagcggatcttatcatatccagccagttcaatatgtcccggaaccataattttatcgaatcctgatgcatcaaatgtttcctcataaaaattaactggtctgctttttacatttttactataagaaaactcccactgcccatttaatgactgaaataatgggtttttctcttttttcatgtccgaataatccgaatagtaggaatgatcactatgcggagctaattgattcaccttaaatacttccggattatccaaccatttcatatcagcattcatatttttccttcctttccaaacaaatccccaaaaaagatttttgggatttgttcgttaaaaatttcttgttctattttagtatacacctacaaatgagattacaggagcaactcttgaatcttcaatacgaatttcaattgcatctgtttctacgccctgcaaatcgatgatcttcttataaccaattgtggtagcatccaccattttttcttttcttccatcttctgccgcataccatacagaaaacttctccactcgctgactgaaaggaattgcctcttttaataccagataagataatttctttttctctgtccactgcagatgaattgtcaattctctgtccccggctttatttctgaacacattctcataatcatctactcttaagagatctgcatttttaccttccgcatccttttccggaactgttgtaatttcagcgatatctgccaaattatctttaaacgtgcttcttataaaatctccaagcatttttacattattaacatctgtctgatgaagttttccatttttcattggaggaagattcaacagaagtgttgtatttccaccaactgaagataaataaatctctttcaggttttcgaaagaacgaacttgatcatcttcttcctcatgatagaaccaacctggacggatagaaacatctgtttctgccggataatatgctaatttttcttcattacgcaagcattcacggcttccaagatcttcctgtgtttcatctaacggacgatttctgaactcttcattatcttcctgctggctgagctgtgctgtaatcgccggatctgtcatatctgcggcaacgacactccactcacttggacgaacttgtccggcttcgtttccacaccagcggatatccggacctgaaattgagatcacagcgtttggctggagtttacgcatcacttcataatatctctgccagtcataaacctgtttctttccattgctgccttcgccacatgctccgtcaagccagattacaaatatgtcaccgtagtttgttaaaagctctgtaagctgattcacatagtagtcatcgtattctttgccttttccataagattcattgtttctgtcccatggtgagagatagactccaaacttcagaccatattccttacatgcctctgctgtttcacgaacgatatcaccttttccgttcttataaggtgaatttttaatactatgttctgtatatttgcttggccataagcaaaagccatcatgatgtttacaagtcagtattaatcccttcattccaccttcagcagctgtctttgcccactggcgagcatctaactcttcaggattgaagatagattccggttcatcgcctaatccccactcacttcctgtaaaagtatttactgtaaaatggatgaaacagaaatactccatattctgataagcgatctgtcttttgcttggtataactgaaattaaacgttcatcctctttcatacccttgtattccattttaacactcctccaactgttttctaagcttttcattagcatcttctacattcattcttgacatgataaatgtaatgatcaatgacaataccatcggaatccacaaatacataacatgcagcatgttcaggcatgattctggctggattgttgcttctttcacaaatccacttgcatcaagtaaccatccacaaagagcaactccgattcctcctccgatttttgtaccaaaggaagtacaagaatacattgttccgtcaatgtgtttatgttttgtaaggtatgtatattctgaacagcttgcaacaacggctcccatatccccctgccatggtgccattccaagtgctgcaaccgctgtgaatgcaagcataagtggaacactgcccatatagccggcaaaaatcacgcctacacgtcctgctgttccaagaatataacctgcaagattcattctatataaacctttcatcttttctaccagcataggtgtaatgcacattgcgatgatgacaggaatattgattgcccatgaaaatacagaatataaattttcatttttcagtatgtaaatcatgtaataaattcccatatttaacatagctgaataaatctgctgacaaatataagtagcacagatcataagataatatttattggaaaataaaagttttgctgcctctaccagactatatttttcttctgtgtggtctttacctgcttttaattcttcttccggaagctccttgattgaaaatacggaaattgtatttacaatcaatccgatgatagcatatactacagcaactgttctccaagcagctgctccaccgcctgctgctcttacaaactgaactgtaacagactgaataagtaagcttgttgaaaatgcaaagataaaacgccatgatcccatctctacacgttctctgctgttttttgtacaaaatgtaaccaatgatgcatatgcaatattatttgcagtaaagaatacagcatttaacagtgtgtatgcgataaagaaccatgcgtactgagctgttgttccaagactgtccggtattgcaaagtttgctacaagtgttaccgcacaaccaatatacgcataaagcatccaaggtcttgcttttccaagtttgctttttgttttgtcaatcatagttccaaagaacatatcgctgattccgtcaaataactttgataccatgatcaacgttccgataatacccggatttaagcctactgtatttgtcaaatacagcattacgaatgatgatagaaatgcatacacaacatttcctgccagatctcctgaaccataacctaccttattataccatttaaggtatctttttttttccatgtgaaacttctcctttcaacaactatctttagtttccacaacttttatataattttacaaaaattatataaaaattttacgccagaataaatatcataaatggaacaaaacatacacaaaataacctttttactttttgtttttcgttgttatccattattaaaaatggacttatcattaaatttgtgttaaaatcaaactaaatctatcatttttgtttaattttcagacagtttctaattattttcatatacggaggtagcaatgtacacaaacaatgcatatctaaatgattcgcatatagacagaaaggataaatcaaatccacttattgtaacaatgtgcggaacttataagttatataccaaaccaaaacttcctacatggagaccccgtggcagagttgactttcaattattatacgttgcttccgggaaagctcatttctattttgataaggatggtactgataccattgtacatgctggtcatatggttttatatcgccccaaagaacctcaaaaatatgtctattatgccaaggatcacacagaagcatattgggttcactttactggaagcagtgtcacaaatctacttcgttcctatggcataaccaaagataagcgtgtcttttattgtggttctgatcctgaatataaaaatcttttttcggttatgataaaagagttacagatgtgtaaatctggttattccgaaatgctcgaaatgtatttaagacagatttttattagattacagcgtcattttgagcaaacgattatgacagacacatcccagatagcagaagaaatagacaaagccattgtttattttagcgaacactataatgaagcaattaatgttgatgcctatgctaaacagaaccacgtcagcacaaactggttcatacgcaatttcaaaatgtataccggaactacgccaaaacagtttattttgcaaaaaagaattaataatgctgaaacactactacaaaataaacaatataacattaaagagattgcacagataataggctatgataatcctttatatttcagccgaatctttcaaagaacgaaaggtatatctccatccgagtatcgcaaaaacatataaagtataaataaaaagggaagagctgatcagtcatatttatcagctcttccttcttgtttgcaaattttgtccaccttttatatttatttggcaagtaatatttcgtttcacattttataatgaccttgtcaacagaaaggagatgaacttctatgagaaacaaattccacaactttgttcaacaactacttaacttttatgcagacttttttactcgcagatattatcctttataattatgcagttgtttccacaactttatttacacaactgatatttaaatttctaggattgattttttgcaaacttttattttgtttcacactttataacagccttatcaacagaaaggagatgtatttccatgagaaacaagttttataactttattcagcaactgcttaatttctatgcagacttttttactcatagattttatcctttatagtatgcgattgtacccacaactttaattatcctcacctgatagttaatccataggattaacttttcgcaaacttttaacttctacatcactcaacacctcttctgtagcttacgattatgtaggcccatatgtgatatttattatttagaaataatccatctagttttttgccttgttatccgatggcaatctcacttccccagttctttttttcataattgaattctgtgtttccatctgtgttggaatataatcgctttcctgcagaaatgcacctgccgcctcagcatatgattcatatccagctgctttcattctctttaacattttttccaaagcactgtttttgtctctgctcacctgtcgtgtgctgatgcccagttcctctgctgtttccttaacctgttttcccatgataaaataatcgctcacgattttcttttccttctctgtcagatcactgaagagttctttggagaagatctctgttgtgatatccgatgcaatgtcagcagtaagttttctgtatcgagttgcataacatcgataaaagtatatcgttaatttaggcagatagcaatctatcttttgtaagcgcaaaatattgctacgctacccatgaattacgcttgcatcaaaatgatagatgcaagcgttttactctagtttagttttgacagttcgctttcgcagtctcgctccatggggcaagctgttccagctgttcatctgacattttagcgtctggccgctgtgataagagatatgtcagatatttttaggtattcaggtcattcgcttttgccatctcaaccattgtatacacaatagcgctagaggcagctcccttcgggctggcactgaacagccagtttttccggccaacagtgaatggtctgattgcattctcgctgagttatcttcatatatgaataactaagcgaaagggcaatccgtggtttctgtatcggaaagaagaactggcagatgatcgatacgatccatggagccaaatcttccgcaatcatttacagtattgtagaaactgcaaaagccaataatctgaaaccttttgattatgtgcagcatctcttggaagagatgccgaaacacatggatgacagggattgttcctttttggaaaatcttctgccatggtcagaaaaacttccggcaggaatccgcaaagcttaaatattggtggctgcaaagcagccgcctaaaaatgtcaaggtactcgctattttgcgtttacaaaaaaacagtctgccttgacgaaaatcacttcaatcaaaacaaactgttcttcatatttactctaattttattttatgagaataactgatttcacgaaatttgcaggtgaatctggaatataaacaagagaaaaaaatttttttaaactccatttgcactccacttggtctttctgactacccgcaaagcctttatttataggcttttccgcgatttttcaatctactcgaattcgggtgcggataggataatccaggtactttttagtacacatttgtgttattttgtattcatattttctgaattttatctgatgtttttctcatgccaaattattagagccaaaatagagccatcaaaaactatttattctgctttaatttttctaatattgatagcacatccggttgtgtaggcatgaacttcacaccacgctttaacattcccaacacttttcttgctttctgcccaattacctttgcagtatgttcactggtcagcatcaaatgatttccggcaattgtatattcacgttctatgtattcctctgtgataggaaacatatcttgtactataaatgagcaaatttgaaaaattgcacaaaactacactgcgaatttcataaatgaatcaaaatcattgctttcctttgcgcattgaaaaagataacgatacttttccagctgaatggtatcacagatttcgtgatatccagtttcaaacgaacagaacctaccagtacccactgcacacatgaaatgtgccagtgacataagcagccagtaccttttgattccctgtgcagagcgtatctgatagctgtccagtgccagtttatccttacactggcggaaaaatacttcaatcggccatcgacacacataccaggaaagaatctcctgtgtagatagggctgcgtttgtactgatgaaagcacgcaatgctttgggattaccaaatgctttttccggataactcaaaagaactaccgcattttctatgccgttgaggtttccctcgtaccggtacacataatagtttcgttttttgactgtcacaaggtcaaattcacgatgtgtaacagacaattcggcggccagttcacgaagtttctttttcattcccgatggatacagcaaacggtttgttttcaaagcaccgatggtatggaaacctctctgtgcaaaggtattgattatcttttcagaaacataccagcagtcgcaaagaaaataggacattaccggtggaacaggcagctcctttgcaatgctttgtacaatgtcaatcttggaaattgacttattgtacattacaaaagcatagttcagaacaatgccattgcaggaaagcataacagcaactgcctgatgcccgtagtcctgttttccctttaaatgggattggtgaaaatacgcatcttcaatcggatgtaaagcccgtgacgaaggctttgtctttgaagcaatcgtatcgtccacaatgcagaaaacaggctttccggtgcgtgctgcttctgaataaataatctcaatgacagagcattttaacgtatctgaaagtaatgaatcatcccattttccggaattgagaaaatgggcaatcgtcgttctgtggcaggaactgtttttagcaaagtccgtagtttttccatgatatcctaaaatgaaaatactgattaggatactcataagatggtttattactcggttcgaataaaatttgcataagtttaattttttaaactggttgtatatgaatgaggaatgatgtatagtatttgcgagagacaccttctttcgtaaatgttgcaaatgtttgttttggcactttcattatacaacacatggaatcgaggtgtctttcttttatgcaaaatcacgaacttgctcatttatagatcttgtattaaaaatacactttctcgactatcgtccaatttcacaatatgcagaatatcacaagattttcccacatgttcctttttctctattattttgcgaaacttatctattctgccagaaagcggtatcatccaataaattcctgtagcattatcctcaaaacaataataatgtggtctattgcctgccttattccccttaagatacggatccggcatatcttccaaaaatctgtcctttatgatataaaaccctgttttcttcattcgttccatcctctctgtgggaatatggaaaaagtccctcgcctttcggcgaaggactaaactttcaacccaaccatttatataccgcatatcggtcagcggtaaactttcaacccgaccatttatataccacatatcggtcagtggtaaactttctttgtactaacatactaccaagtacaaagcagaaagtcaatagaactatccattaaaattatatgctgttggcacaaaattattcaaactctttttcgggttcgatttttcatgttaatctgatgttatcatgtatcaaaatcgtgtcattttgatacgtttttatattttgttaatgtggtttcaaagctgctgtacccaaattgtacccggcaccatttttaatagtctttttccatactgtcttttgcaaaaatatattctttattctctacagataatgaattaatcaaaaaagcacttttaccattttgatgtactgttattgaaacacaatactcgcccgattcatttattacttctttcaaatcaaacatatatttccaatgcaaacattcactgtttattaatattccttctgccaccttttcaccatcaacttcattattaacgtacttatcttctcgtgcaaacaacaatttttccttttcaacagactctgtgtaaattttttcttcatccatattccatatttctatatccagtccattatagctttctgctgacgtattacaaatttccactataccatcaacattgtaacttacactaattgtcgctttattattcacaataaatatagcacttatagtaaaacataataatgctacaaacatccattctgcaatttttcctcctaccttcagaagaattctcttaatttcctctttactcttatgttttacccattgcacaacaagaacaattacaacaactgcacacagacaagagaccaaaatcccactccatttttgactctcctctccataaattgcagataatggaatagataaaatgaatacaaaaataatcattattgtatatattctaaaatcacttagtaagtacatgtatctgttgtctgattcctgatcatactgcttataattttgatccagcatattgtatctttttaggtcacttattacatacaacactatgtcaataaatataataactgatgttgataatgcgaatgaaaaaagtgcttgcaaataccaatatattaccccccccgctccgaccaaacatttaatgaactaattgtcattttaaataaaaaagcacatatcgttcctattaccgcgacaatagcaataattgctcctaatctggttgttcttcgttgctctttctcagcagcatctaccaatatctcttgctgattttctacctgttctttatcaccattagcactcagcaccttctgctgattttctacctgcattttatgtatttctctttttttcatttttttatttttcttcttgtgtttatttttactcatatatattcctccagcgatattgtatccgccacgtaccattgggatctttctttgcattgcagctcatgcacttacctcctttgctcctccgtaccatttttccttaaaatactccaccggaattttcccggcaattgtgagaaatcctttacttgccaaatccttattcatttctctaaggattttgtaggcttttcccatactcacaccaagcatttttgcaatgtcctcagcactgtaatagattttttcatccatgtttttccctctttcgttttatttgattctgtatagtatcattttgtttcgtttttataatatcgtaacttttgttacgtgtcaatatctttttgctttatttttttcatcttgtatgttatcctatatttgatgttgaacagtttcaccaaaatatagctttagagcaggaggcatgtttttatgacagtcggggaaaacataagacgtatccggcaggagcgtaatctaacccaaaaacaattaggagaaatggttggtgcaagtgaatcctacattcgtgcctacgaaagcggcagaagaaatcccaaaccatcctcccttgaaaaaatagctgatgctttatctgtcaatcccgaagtactggcgaactctgattttgatggcataaaagccatacacagactttttcagatattccggcaatacgatggacaactctttgaataccaggataaagatggaaatgatatggttggaatcagctttggaacattgtctttgatgcaatcatggttagaccgctatgaaaaatatgtggaagaagttgaaaaatgcaatgaaataaaagatgttaagaagcatggggaagctctgctgaaagctgaagcagactttaatctctggatggatatttatccggaatcggaaccatggcaggaacggcttaagattcagaaggcacatgatgaggttatggataaaattgggctaaattcaaaaaatacaaggtaggtgcttcattgaaattattacatttatatatagaaaaatacaaaaaatatgaaaagcaacatatatttttcagtaaagatacttcatcttgttatcaaaacgaactatttaattctatacaaattaccctttttgctggtgaaaatggttctggcaaaacaacaattttaagttttatagccaaaatatttcgttacattcaacgttttagagatcgcattccttgtgatttttctcttgcatatacaattgaaactgatggaaaagagcattctatcattttagaaaaaatagagagcaacataacaatatcaattgatactatcttatatcatctcatgaaatatgacattcgcacaaagtcatataaatatgatttatcaatttatgataaacagataacctacgatgagattaaaccctatcttcctgcaaatgtattagttcttgggttcgatgttgactatgacagaataagctattctcataactactatggtgatcgccttgttaactttagaagcatagactccgcatacacaacaagcgcaataggttccgacttttctcttggtattttgaatacaatattgcaatcaacccaaaatttagaattgcaaaatatatttaagtgtatgggatttgaatttgccccctttgttgatgtctattttaattttacttcagatgattggaatagtgatttaaacaagtcaaaaatcgaaaaaaaatacttttacgaagaatattggaaacattatatcgataaagaggttgggatgaattccagaattaatctatcgatattttttagagagcaaaaaaatatcgacatattttcctattttattaatcacaattatatttatataaatgaattttatattgtaaaaaatttctcctacattcctattagtggtatgagtacaggcgaaaaatcattcctatatcatttattctttatagtagataaaatacgcaacaactccttgattatttgggaagaaccagaaacacatttaaaccaattatggtcaagacaacttattcctttactaacatatatgttttgaaaatataatgttcattttctcttaagttcacacgagataacattaattaattgtttatttccaaaccaaattattttactaaatagtacagatattaaataccctgactttcaaacatttctagcaaatgaaaatgaaataatatttaagctatataaacccaaggtatacaatccctttgaagaatatattatagaaaaaattaattcttgtaataaagatgatcttaaagaactattaaataatattggggaatcatttttgaaattccttatataccaacagataaataagtgaggtacatatgtggtttgtaacaaacaaaactaactgtataaagctcaaaaaatttgaaaaaaaagtaatcattcctttatttaccgaattattaaactacaaaaggcaatctgactattctgactttgttaaatatttaaatgcaaaaaatataaataatcagaatgatgctttgatttatatatgcaaaaggaaagtaaataaaataaaatttatcgattgtgttaataaaataattagtgactatacttatgagcaaataagatggtacttttatatatacttaatacagaacaagcaaataaaagaaaaacaaacatctatcggctttttcaaaattcctgaaccttttaaaacgatttttgtcgacttcttttataacaaatttttttcaaatgataaaatttggagttttttggacacatctagtttttctagaagtgattttcacaataattttaaaaatgaaaacagactatttgtctgtccatactgtgacatcgacacaaccttgaatatagggaataatcagatagaacatttttggcctaaaagccagtttccttttcttgcaatgaatgctctaaatttaatttcaagttgtcattcctgcaatatgccttttgagggtaaaggaacttcagttaggactcccatatcaacgccctatactaaacaaattggtaattatgttaaatttattatgaatatttcaaaagaacaaattgatatttccactaatttacaagatataagcaattatgtgtatttactcaacctaaagaaccgctatgccaatcctcaaatatataattatctccttaacttaggaaattcgttatatagcgacataattcagtatgaaaataatttaggaaaaaaattaacagattctgagctaaataattatatcacaacagccaaaaaacatgacaaaaaacacatacctctttattttgcgttgatgagcatctataataactacgataactatatattgtatttacataatataaaatcatgaaaaactataaaattaatataatattttataacacttcaacccattttattgttttgtacccaaatcgtacccaacgccatctaaaaaatccctacaaagcccataaatacaagctttgtagagatttacctttttattcaaactcggcaaatccaaagatattcttaaatatatttgtttaagttttatatcttttttgccgttatttcatttctgttgcatatattattttggctcgctgattttctgttgccaatttgttgccacgactgtattataacaaatcagctttaaaaagcaaacctctataatggtataatggtatcgtaatttaagacactttccgagacattttataatgaatctgatatactgtaaccaatacagaaagaaggattattattatgtcacgaacaagaagaaatttctctgcaaaattcaaatctgagcttgttattgaactgctcaggggagaaaaagacttaaatacaattgctgctgaaaataacattcaaccaaatcttctccgtaattggaagaaggaattccttgataaagcttccgttgtctttgacgatacacgagaagagaacctgaaagagaagctggcttcagaacgcagggaaaaagctgaatacgcaaaaaaagttgggcaactcaccatgcaggtggattggttgaaaaaaaaatctgaagaaacacttggacctgactacgagagtaaatttagtccgaaaccttttgaagactaaagagctcccggtcaaaacaggtgccagattgcttgatattaatcgcaccagcatatattataatggaactcctgtttctcaggaagaactggactgtaagaccattatagaccgtttacacacggataatccggcatggggtgcccgtcagatgtcttcacaactgaaaatgcgtggccataaagtcggccgccgcaaagcacgccgctacatgacagaaatggggattaatcctatctatcccaaaatgaacctttctaagcgtatgcaacaggcaaaagtctgcccgtatctgcttcgcaatgccgttatcgaccgtccaaatcaggcatggtcaatcgacatcacttatattcccatcaagcgtggattcctgtatctgacagctgtaatcgactggtacagccgctgtattgtaggctgggaagttgatgataccctggataccagaatggttatcaatgcattgaaaaaagcgtttaaaacagcaaaaccagttatcctaaagtaagcgcaaaataattcgacggattgtgttgccctaaaaatcattccataataatcattagaaaatgcaagcatttcactttatcttctcttgccagaaatgatagatgcgagcattttactctatccgatttatggaggtgtgctcatgagaagcaaaagaatacctgccgaagaacaataccgtctcatcatggaatgccgtcaaagtggattgacagatcatcaatggtgtgtggaacacgacatcaaaccgggaactttttacaactgggtaaaaaggctgcgtcagaaaggttgtgtggatttgccagcgtcaaccggacgcatctatcgtgcaccggaaaaccaggaagttgtcagagtggattttcatgatactgacccgctccaatatgaacagccattaaatgtgattccggtagctacggaaagaaataacctttccgtagcagagccaatgaagctgtctgtaggaagctttcatctaacaataccaaatggaacagatcctcagcttctggctcaaacgcttcgcattgtgaaggagttggaatgttaggggatatcacagccgccgatgaaatctatatcgtaacaggcagaacggatatgcggaaatccattgacgggctgtgtgctattgtagaggatcaactccatatggatccaaggcgaagtgccctgtatcttttctgtggaaaacgttgtgacaggatcaaagctttgctctgggaatctgacggatttgtgctgctgtataaacgtatggaagtccagggaagattccgctggcccagaaatcagttggaagtaaaacaattgacctggcagcaattcgactggctcatgtccgggcttgaaatcgaacaaccaaaggcattcaaacctacggaatgatcgcgtaaaacatctatgccaaccaacagaaacggagggggttctcaccctatatcatgtctgaaatcccttgtaaatgctgggttttctgcttctttttcattgctttttatggtataataagagcagtgaaaaaggagcagaaaacatatggctggtaattcaaaagattcaaaaatcctcgcgtacaaggacatgatcaaccaactgaataagacgatttccacacagacagaactgattcagtctttacaaaaaacattggaagcagaccgtctggaaaaagaaaaccttcgtcagcagattgaatatctcacgaagaagctttttggtacttccagtgaaaaacggaaagatatcgatggtcagctgaatctttttgatgaagccgagcaggaagcagatccgacatggaaacaggaacttcctgatgacatcactgttccggaacataagcgaaaagcacgacggacacatgcagatctctttaaaaatgttccttcctgcgacgagatcatttctcttccggaggaggagcgaaactgtccaacctgcggaacgcagatggaatgtattgggaaagaattcgtccgccatgaatttcgctttacccctgccaaaggaaaagtagtaaatatctatcgtgaaacctataaatgcccggaatgtgccatatcagaggaacacccagatgatcagacatttgtcaaagcgcctgtccaggaaccattgatcccagaaagttatgcatcggaatccgttgtaggatgggcaatgcaccagaagtaccagaatggtctgccattaaaccggcaggaatcggaatggaagcagctgggtgtcccattaagccgggctacgcttgctaactggatcatttactgtgccgagaattacctctgtcatgtttatgattattttcaccgtcagttacggatgcgtaaatatctgatggcagatgaaacccgggttcaggtactgaatgagccggagcgcaatcctgaaacagattcctggatgtggctcttccgcagtggagaagatgggcttccgccgatcctgctctatcattacacagagacaagggcaaagttccatgcggcatctttcctacaggggttcagcggatatctggagactgatggataccagggttataacaatctgccggatatcaaacgatgctcttgctgggcacatgtgagacgttacttcacagatgccataccgaaagggaaagagtatgattacagccttccggcagtgcagggagtacagttctgctccaagctgtttgattgtgagcggtactcaaaagcaaaaaatcatactgcggagcagagaaaacagttccgtcttgaaaaggagaagccgatactggaggcattctggaattggctggatcaacagcgtccaaacaagggaacccgtttggcgaaagcggtgaactatgcccaaaatcggaaagacaccctgatgacctatctggaagacggtcattgcagtttatccaataatcttagcgagaatgcaatcagaccattcactgttggccggaaaaactggctgttcagtgccagcccgaagggagctgcctctagcgctattgtgtatacaatggttgagatggcaaaagcgaatgacctgaatacctacaaatatctgacatatctcttatcacagcggccagacgctaaaatgtcagatgaacagttggaacagcttgccccatggagcgagactgcgaaagcgaactgtcaaaactaaacatagagcaaaacgcttgcatctatcattttggtgcaagcgtgattcatgggcagcgtagcaatattttgcgcttacatcctaaattctgatcagggatgtcagtttacaagcaacgaatatatgaatttcctcaaggagaaccagattcgtcagagcatggatggaaaaagccgttgggcagataatattatgattgaaagatggtttcgtagttttaagtacgaggaagcatatctgactcagtatgccaatatccgtgaagcacggaaagcgattgggaaatatattcatacctacaattttgaacgttgtcattctgccattaacaatcaaactccggcatcctattattatccggtacttttgattgagtatgcagcttaagggggacattcttccccttttcaactacatatatctgttcattataaaaagattaaatttgtgtcttgacaactgaaccactatacattcttatcaaaattcttttttagggctacttctgttggaaaaatggacccgattaaaggaataagttgaacaccgcagataattcctcctatacgccccacgcactcttcatttttaccgattactaaaaacatgaatattactgttatcgataacatagctattccagaggcgcaccaaactttaccacaatatttatgagcaaattcccatgtgtctttattcttcatagacatcgaagttcgatatccaaatactgcatttatttcctttggagcatttttcataaaatagcttccaaaaccaatcatcgtaaccggaatgagcagatccataatcaacataaaaatccaaaagcccattgtaaccccccgttcacttcgtaaacttcaaatttctcttctttttatcttactacactatttatttgaactcggcgtgccctttaatgttattaaatttatttgtttaagttttgtgcatatacacaccgttatttacttcaattacatcacttactctgccttacagattttctgttgccaccattacttgattaatactatttcttaacttttaaaacttcttttatatcatttacaaaaaaggccaataagttacctttcttaactttctttaatcctaaatcctttcgcatttcgttcattatttcttccattaaaaacaaattattcgtacctgcatctggtttagccccattttccctaaatttcacccatttctgcacaactttagatgacccccaaagtgtgatttgtcttgaaaatctagagagatcttccagcatcatttcttccgtatagcttccactattttttacattttgttgaattttataaatcatctcaacaaattccccatatggtatttcccttttttttgctaaataatcctgtctgctttttctataatcaattatcttagcaacgacggaactaataattacacctactatagacaccgttcctgttataaatgcaacaattacaactgcatccatcttagacgccatattggatacccaatcaactaatgcgttaatgatacgtcctaaatataaaaaagtataatatgctactacaaaacaaatagtccctataattattactaatgctagaccaacaatcatgtttaatcgtggatgcctacttgaaaaagagcctccagcattcattatcttttcatctctgtatcttccgacaatccaacatactaatatactcaacaatgagccaatgcaaattatgattgcattcaacaaaactttccctagacttagattaactgcaaaataatatctagaaattactatagctattatctttcgatatttaaacagaaagcaaattaaaattagtgtaaataatataaaacaaatttttttaatcttttgttttcttaacacttctctcccccttaaaacaactctcgatgccacagaattctttatctttaaataatcaaaccatatttttatggcaacgatattataatataaataaaacatcacaaaataaaatatacatagcaggcaatcttatagaccacctgctatacaatataaataatatattcttgcactattcaaactcgtcttttacattcgtatgaacgcttataaaacgtattatcagttcgttttatatgtgttttgtgattaatcatccgcacaatctacttcgtccataatatttttgtagccaaaatgtagccactattttttattcacctcaatacaacttactcacaattcccgagcttttccatattcaaaatgagttttacctggtggcttacaagttcttccttaaataaaattaacatttgtacaaccagaatgaaatcactctactcgattgaagatagattatattatcctaatctcaaactccccgataataaggcaacttgctcaattgatatattctacttttccgtttcagtttcctttgttaaacccctttataattgtttctttttcattttccaaaaaggtttcaatttcacttaaataaaattgcggaatctgaaaaaatttgaatggatctaactgaaaaatatagtcattttctacatgatttgtttcattgacaaacttacatgcagctggatacttcttttttaatttagaaagtaatccatcatatctctcaaaaagaagccttgcagtcactgttttttcatagttatcagcagatgcaagtgcatcaaacaatatttctgaactaacattctcaataatgtcatcatatgaaaacaaccccaaatagctctgtatttcagccattccacttgccttaaccaactcatctaacatggtttctccatcaggtagtgttgcaatttttcttccgtgaataatattagaaaggacttcatatatatcactttccgaatacccgggttttgtcaactcgatatattttcttaaattcacaatacgtaccgccatacttctatttaggtcatttgcaattaattttgtcaattccacagtatttaacaagtcatcccttaatatttcgtactcatttatagtaccattttcattcagcaaatattttgctttcacaggtgtggttaatcccattcttttaaagaaatcattatgcacataatcaataagcggttgcatatcatgtgttaccataagtactgtcttgtctcgaaaacttaccttctgattatcaaacaatcttctaattactgcaaattttttatccttatcaaacgatgttattgggtcatccaatacaattaaatctgccttttcgcttactgcttcaaacataaacataacaagagaaaacgcattttttctccccaactcaaatgtgtatctggatcagatacttttatatcctctgtattaatcggtgataaatatgaaatcgctttattttctccatcaggtataatctcaaacttatatggaaatcctgccaataaaaagaattgatttatgtcatctttccttttactaatcaatgcctccatctttttctcgtgttgtacaaataaacctcttaatttcccagtatttaccttcagattattaattttattttccacttcatctaccatttcgtaaataagctcagtcgaataaaatttattaatctgcctcttatctatgtacatctcgtttaagttattatcaatattttctaattgttcatgagttacattcatgggtctaaacagacagattttttcaattttcttgtataaatactccgtttccgtccccaaacttttcaactctgacactaaagaatcttcttttcctgtactgctaatgtattcttgaagaacggatattgcatcttgattgatataattctttgctactgcctcatgtaaatattccaaaacagcatttgccgttgaaagagctgaatttttgaatactttcgaaatcacttcattttctttatctatttcttttttcaatttatcagcacaaaaagggcaattttctccgtgcatctgttttataccatcatttctccacttcgcccatttagtaacactaatcatatctctgtcataaaaggacttataacctttcagttcatcatacttatcaaaacctgcaccattcccctttaaaaattcaccaacaccacctttttttgaaatttctccatcactatatttaacagtctctgcatatttaggtaaaaaagccctaatattctgaatagcttcattttgttgaaaaatcccttgtaactcggacagtaattcagcaatgtcacctgccagtttctcgcattcttctgacttcaaaaatacacgaaatgaattttccaaaaagcttttttctttaaataaataagaattgacataactttcgtcaaaaaccataaccttattgaatgttacaccattcacttctggtttttccgtttcattcgctccataaggctgtaaagactgaagttccgaattattcccatgtgttttcaagaaaatcgccttactgattgtagattttccagtaccgttagaaccatattttatattcaatgttccttcttcaatctttatatttgcttctttaatacagttgcaatttttgattccgattactatttcactcatccataatctcccttatctatctaaaccttacctgcaaattcattttaatatacatttccccatcctcctcatacagactcatataatcatgtctgcttgtggaagccctttctaaaatcgtattatctaacagatactgttcaaaaaagtttctgttataaatatgataagccaaaatttctccatttgcctttacaattatgtaacctccatttgcttcatccagtccgtcccaaggttttgctggtttcattcctaatgcacacgaacataggaattttttaaatttgtatgtatacatcatagcatcaccatatccaagaggatctctttctccaagcatttcaaccagcttgtcacattccttcacatcttctgagtagaaatataacaacatatttccaataatctcaggcatactactatccaccataataagatttcttttgaaaccgtcatggctcattccacaatacttcacactaccgccatattcgataatttttgccattctatccttaatcttggttcttgtatcaatagcattgatttcatttgcctgttcaggtgttatacccgtaactctatatatgaaattagtcgttgtacctgcattcatcaaagtaggtgcatgtcctacttctgatttaattgaaaaccctacattgcgaataaaattagtgtgaatgtcttcaatctgcattgaaatatccgtcgtatccgttgatggtgctttaatctttgtgacttttattccatttgcaaaactggcaatttcctctacttcaaaactgccgctatgtgatgcaatctcctgcaagagcagatttgcattatcatccaacgactttcttgacacactcaggacacgctttgactgtatttccaaatgcaccaggtcattatcaatcacatagtcaatgttctccccttttacttcctctctcataatcttaagaatcggataatatacctcatctattttctccactctttcattagcagcgtaaactcttccctgactgagtaatttcataaatgcatataactctgaccattcacctttattacctgacattcttccatctttatttgccattctccaacaccttccttatctctttggcaattgcctcaataacattaaccgttacactattaccaaactgtttatacaaatgtgtatcagccagttcaagtttaaaatcatctgggaacccctgcaatcttgcccattctctcggagtcatttttctaattccctctctgttcacttcgcccttaatatgtgtaacgggaacaaaatttgtaagcctcttatcaataataagatttctctctctccccataccgccacatacaatggctcctgccttaccatccaaatctcttatttcatagccaaaaccattccccttagattcatgacgtgctttgtgtttctttaacgtatcaatataaactgtagacagataatatttaacactaacctcattttcttccataatatcccttatgcatgtattaggattagtaggctctggaaacttaaacttgctgctgtcgatatcgtttctgaaagccacaatataaatacgttctctgttctgtggtaccccaaaatctttactgtttaaaactttatcataaacagtgtatcctatctgttcaaaagccttttttataactttaaatgttcttcctctatcgtgaatggcaagcccctttacattctcacaaaaaataactttgggcttgtgatattcgcaaatccgtaccacatcctgaaaaagcgtccccctacataaccccttgtagtcatcttcaaatcccatacgcttacctgcaagagaaaatgcctgacacggaaaaccagcaagacaaatatcgaattctggaatactcttttcatcaatctgtgtaatatcacctgctatatcaaatttatcattataattaatcctataagtttgctgtgcatacgcatcccactcacttacaaatactgtcttgatttttcttccaaatgccttatcaaaaccttttctaattcctccaataccagcaaacaaatctattgatttatacatgcgaaatctcctctactccatatcgtaatcattatattttgcatcaaaaacagcttcttctataacccgtatacactcttctgtatttttcataatgtcttttccccagaatcgaatcacagtccatccaagaaattgcagttgcttatttatctcattatcatgctgttgattttttgatattttattaatccaaaattctgcatttttcccacgttccaactgaggttttagcacttcccagtctttcccgtgaaaaaattcactatcacaaaatataactattttatatttggttaacacaatatctggtttacctggtaattcagaatagttcttcctgtacctataacctcttttccacaattccttacgcaatttcagctctattgatgtatcctttgatttaatatttttcatattcttgtggcgttgctctttagtcagtctgtccactccaatcactccgattcatctggaacaatttctaaaatatccgaaatttcgcactctaatgcgacacatatcttaagtaatatatccgtatttacattctcatttcttccaagctttgctattgacgcattacttatccccgccttttcagcaagatcctttttcatcatttctctgtcaattaacaacttccacaatttcttataacttatcttcattgtaccctccaagcacagaacatacattcgtttctttcttatcatatcatacacacaacgatagggcaagttctttttcacatttaattatgagttcacacatttaatgttttgattaaacaactcagtttctagcatttccacactcagacaggggataagataatccccatgtctgatataagtgccgcccgtttcttcaaatattgttttcttcataatcgtttccacctttcttatcgttctctatccatagattgcttcttaactgaccgtttgggttgttgtctgccttcctgttgatagcggtgcagcttttccaatacactcgcttttttcggctgttctaacggtttctcttttttctgttccgtctgatttttccatgcccttagttcttcgttgtattctataatcaattcttctgccttgttataaaccttctgaaaggcttgcacattgggatagccttcccgctttactatctgttccaaactcttgtgcagacgtttctccaaatcctctaacagttcaattttcccctccaaagattttcgctctttgcctttaaatagtcctcgtaactgtgacagttgttttttcagagaagaaatatcctgctgtgtgcgttttatctccatggactgtctctgcaattcatacatgagcttctgcatatctttccattcctgcaagtcaatctttggtacaggtttaggcggtagtttaaatttgaaaattacttcctgcaaaaaatctttcgcacctcggataatctggcggaacatatctggcagccaaccgtgtgtcctgatagattgcagcgttttatctgtaattttttcctgctttatcttcaaaatatcttcttcaggaacgccctcgactaatgccacatcaactgtccgattccattcctgccttgccgcattgtctgcctttatctcctctgctttcggattgttttttccgattttcttagttgccagatatacgccgccctgttggaatacggacagtttttctgattcttcttttacatatcggttgatcgtatcggtaaatagttccttgacttctttagtaaaggctttgttcttaaaccattcatcctttttcgtgaagatatggctttcataaacttcccctttggggatgatactgcatcccgcccgaagattgccctgctcgtctaaaacctctttctttgtgcgtctatgttttccctgctcatcataaaacatatttcgggtggcaatcttcacttcaggctgctccaacattttccgttcgctgaataccagatggatatgataattcgtttttgtcttgttgtgatgaagggctgcgctgcactccacaccatatcttttatggaaagtttccgtaaaaagtcttaccacatcatctgctctgtactgaacaaaactttcaggaagtgctatgataaactcacgcccctcgatacatttccctgccgatccgctcgccttaaagtccaactgattttctcctgcaagatttttccaaaactccggtgttgccccttctgtctgataggttgcatagagatattcctgtcgtttcggattggagatataatcaatacgccctgtcacatcggacagcttactttgtctaataaatgagtgtcttcctataagcatcctccttcctcagctctcgccgactttattgtgagtaggtgcataggcacctgtttacgaaccgattgccgtatctggcatacgcctcgcagagcgaaatacacagagtataaaccgtaggtttgtgcgatgggtgtatttcgctctaaatcgccgagggcttgtttttgtttaacaaagtccggttacttctcggactcatgcttcgatttatgggcgtatccgggctgttttttctatgactgatagcagatgatccacggtactttcttcccatccggcaagccatatcaaagttctttcctctgcttttgtcagttctacgcctaccagtaccttgttcattttctgtatctgtctgccctccatctcataaaagaaatcattcacatttctactttctctttccggctgctttaacatctgcaacactcccttctgttaaaaaataaaataaattcaaaaattacacgtataagcgtataaacgcattttccacacttttcagaaacctgtaattccttgattttcctaaagatatacgcatatacgcttctttggaaaattcttttttatctgtatctcatctgcatcaacgatagttgtctatgcgtatctgcgtatggattccctgaaatcctctggcatttttcccattgtctgagggaatattcgttgaataatgaatgtgatatttcttttcattttcttttaagtaccccgaaaaactttttgcactcataggtttttctgtattgtcttcacaccagcggcagtatgcctgatataaatttttagaagttgccgttgtattttcttccagtcggatatacccggatgacttcataaaagcaatgatgttattccctgattccatagcttcgtgtaggtttttctttgcacgttcgctgatggtaaagcggtatttatttttcagtaatcgtttcaatccctccagacaccagagaaaaatatcgtctgcttctctttgcagtttctcaatcaaataaggatcatctactctgtctggtggcacatctttgaccgtaaggataatctgtctgcggtaaaatccataggaacggtcatgtaaagcactcagacttccatttccaaagcagagaaatctgacatataaatttccctgtacgctctgctttgacttccgttccaagtccatcttatcctccagcgtgacaatggttttaatatagttggtgtctttcaatgcttccagtttcatatcatcatccaccatcaaaagtcggtattccaaatctgcccttgcaaaacggttatgctctaccttttggatattgcttacattcatattcgttccgaggatttttctcatcaccagaccgatacgggattttccctccccgccttttcctaagataatcaataacttctgtgccttattggatggaattaagcagtaccccatatattcctgcaatgtaggaatatcatcttcctccaacagttccgaaagaaattgtaaccaccgttctggctttgtttctttcatttcataatttacaggtaatcggtttaggcaaaactctttcttctctgtgaaatctccattcagaaaataagtcccattattcacatggatgcgatccatctgcaccggaagttcttcggaataagcttccagtttaagaacctccaaaagctgttttacttttttggaaacccctttcgtaagaaccggttttaccattctgtaaatttctttttccacttcgccatctggcagcattccatcataactgaaaaagataccgttgatacatttcaatggcattctttgcaggaaattttcacaaaatgccacctcatcaatctgcccatcctcaaaccattcctgagagtacggcttagaattcatttccctctgatccaatgctttttccagtctgttccttgttgtttcgtctatattcttccattcgttcttcaattcttttcacatccttcccactatccagtaaaaattcaattctgtcctgtaactctccaaacaccagtaaatccagatagtaatttatcttttctgtttgttgacaggcttctataaattctgctttccattcttcgtctggcattttaggtgcatggctcactttccattctttcagcagatgaagataatctgataaaatgcggatactttcccgttcccattcttcaaatttcttttcggtctggtacaacgttcttttcggtttttctttcttcttactggcattccttttctttgcgttatctataaaaataggtatctgaaaatcttctgccagtttctttgctgcttccaatggtgcaaggtgaaagaaatccgccacaaatgtgatcacatcccctttcgcaccacaggcaaaacagcaaaagcctttgtctactttcatactgggatgcctgtcatcatgaaaggggcaacagatcatcccatttttacttattttaaatccgtactgttcagctgcttgccttgcagttacattttcttttactgtctgaaagatattcattccattttcatctcacagccataatattttttctgaaaatacctaaccggaactttccctttgatgatgttatatccggcattttccagttcctcattcattacccgcacaatttcataggctttgcttctcccaaccccgagaatctccataatgtcatttgcggtaatataagatacattaatctgcatacaatctcctcctttttctgctttctatctatccaaagtgctattgtaatacgcctttatttcacatttactatttaatacgtttttaatacgcacttttaattcgcatttatatcatacgttactttttcgtatttgtcaacatatactttcaataatacgcacttgcaattcgttttatttcgtgttatattatccttgaggtgaataaaacatgaacaaaatggaagtttcaacaataggagaacgaattaaaacactccgaaaaaaaagagggtataaccagaaagatttagcaaaccttcttggaaaatctctccgtactatccaaaaatatgaaagtggggaaattgaagtgtcaatcgcaatggtcaatgaattggctaaagtgcttgatacgacttctacctatcttctcggacatcagacaggggatttcaaatttgactgtctctctgatgttatggaatgtttgtttcaactggaaaaaatcagcggactgcacttttccatagaaaccaaaagaccgccccaccatgatggctggcaatgttccattacttttgacggaaaagacaaatctgccgaacagaatgcagatatgtgcctgttcctcgaagaatgggaaaacaacagggaatctttccaacagtattgcatggctaaagatgcatatgaagattggaaagataaaactcttgcctactatgcttcacagggtgtagagatagaagaaccggaaaatctcgatactgaggaacgattaaaaagaaggaatgcacttttttctggcaaataaacctacataagacgagttgaaaactcttatgaaaggaatgatgtaattgtcagtaacaaaagatacaactggaaaatggatgtcacaggtgcgtgtcaaagactacacaggaaagaccatccataagaaaaaacctggttttgccacaaaaaaagaggctctggagtgggaaagagactttctcaacaaagccaatgcagatatgggtatgctgtttcgggattttgtagatttatacttcgaggatatgggacaccgtctgaaagaatccaccattatcagcaagcgttatatggtagataaaaaaatccttccggtgtttgggaaaatcccgatcaatgagattactccaaaggatatccgtaaatggcagaacggattaactgcatatcgtgataagaacggaaagccttatgcacagacctaccttagagcgatcaacaaccagattaccgctatgttcaattatgcagtgaaatattatgatttacgggaaaatccatgcaccaaagctggcagcatgggaaaaagtaatgcagaagaaatgcagttctggacaaagacggaatttgaacagtttattacagccgtacaggataagccagcttcttatacagctttcatgaccatgtactatactggaatgcgggtaggcgaactgtgtgctttaacgccggctgatgtagacttgaaaaataataccatcgccatcagcaaaaccttccagagaatcaatggtaaagatgttgtctgggcacctaaaacgccgaaaagtaaccgggttatcacgataccacaaacacttgctgattgtttgaaaacctatatggacaagtgttatgagattcagcctaacgacaggcttttcccttacaccaaacatttcctgaaccatgaaatgctcagaggatgtaaaaaatccggtgtaaagaaaattcgtgtgcatgatctccgtcactcccatgccagccttttgattgagatgggatgccagccacttctgattgctgaccgtttagggcatgaaaaaatacagacaaccttaaatacttacagtcatctgtatccgaacaaacaagccgaagtcgcacaacagcttgaaaatattatcaacggaacaacagtcccagatagtagccaactggcagatgtagccaatttgtagccaataaaaagaaaaaactctggaaagccttataaatcaaggctttccagagatgtagcaactattcaagctcgggtgcggataggataatctaggtacttttcagtacacatttgtgttgttttgtgctcatattccctgatttttatctgatatttttctcccatcaaattatcagagccaaaatagagccaacaaaaactttttttaacactcctaacacttttgtatgaactatccgaactgttgttaccatattcttgttatcatcatataaggaaatctaattgcacttgtacccaatatggtaaatcattaaatgatttttgaagttgattacgaattttttgctctaaatcctcttcatcatcactctctttttgttttcctgtaaaaacttcatcatataaatacaatgctgtttctcgcggaatacctaattctatcatcatttttattgtttctgttgttgctcccgactgtatacatgtcaggaaaatgctatctggattctttatatcaaatattggtttcaataataatggtacattaaatgatacaacattttgcaaaacttgtatcgttctttctatttcatccgctcccgtttcaccagaataacgttcctcatttaatatatcatgcaacgaaacacctgtcgcccatttcatacataagttaactaaatatgatctattagaacctttctgcaactctgatggaacataacgttcatacattgatgaagtttcttctgtatcacgcatgtacttcaacattctatttaatttagcttttgcaccgcgttcgtaaggtgacaccggaaccgcttccttatagtcttcaaatattttttgcaacacaaatggatcccaatatctatttttaatacatatatctttcggaatagtaagtgtttccaatttatggattattgccgccacttgtttttgtgttaatttaattcccacatcttgcatttttcgccgtgattctttcccgtatcgtaaaactgattgtcgaatatatgaaatcaaataaccatatttcttcatgctatgatctactgttttatttgtttcaataacatcttctatatcttcgcgatattcttcaaatcgttctccataccctgaaggcaattctttcgtaacatcttcaaacaattccaattgatcatatccatctgcatcagcaaaagcactttcatcaagaacatatgtcctgccaataaaatctttgagcaaacgtcctgcccttccccttaaatttgccatttcataatttgaaagttctgcagccgaatctgtcttttttctataaatgagcaagttcgtgattttgcataaaagaaagacacctcgattccatgtgttgtataatgaaagtgccaaaacaaacatttgcaacatttacgaaagaaggtgtctctcgcaaatactatacatcattcctcattcatatacaaccagtttaaaaaattaaacttatgcaaattttattcgaaccgagtaataaaccatcttatgagtatcctaatcagtattttcattttaggatatcatggaaaaactacggactttgctaaaaacagttcctgccacagaacgacgattgcccattttctcaattccggaaaatgggatgattcattactttcagatacgttaaaatgctctgtcattgagattatttattcagaagcagcacgcaccggaaagcctgttttctgcattgtggacgatacgattgcttcaaagacaaagccttcgtcacgggctttacatccgattgaagatgcgtattttcaccaatcccatttaaagggaaaacaggactacgggcatcaggcagttgctgttatgctttcctgcaatggcattgttctgaactatgcttttgtaatgtacaataagtcaatttccaagattgacattgtacaaagcattgcaaaggagctgcctgttccaccggtaatgtcctattttctttgcgactgctggtatgtttctgaaaagataatcaatacctttgcacagagaggtttccataccatcggtgctttgaaaacaaaccgtttgctgtatccatcgggaatgaaaaagaaacttcgtgaactggccgccgaattgtctgttacacatcgtgaatttgaccttgtgacagtcaaaaaacgaaactattatgtgtaccggtacgagggaaacctcaacggcatagaaaatgcggtagttcttttgagttatccggaaaaagcatttggtaatcccaaagcattgcgtgctttcatcagtacaaacgcagccctatctacacaggagattctttcctggtatgtgtgtcgatggccgattgaagtatttttccgccagtgtaaggataaactggcactggacagctatcagatacgctctgcacagggaatcaaaaggtactggctgcttatgtcactggcacatttcatgtgtgcagtgggtactggtaggttctgttcgtttgaaactggatatcacgaaatctgtgataccattcagctggaaaagtatcgttatctttttcaatgcgcaaaggaaagcaatgattttgattcatttatgaaattcgcagtgtagttttgtgcaatttttcaaatttgctcatttatagttttttaaatataaatgtggatttcgtataacaatattttgtgctggcatattaacaccctgcatcagagttgttgtgcacacgatattatttatctttttctctactatcgctttttccaaggttctacgaacatgcataggaagcttcccatgatgatacgctgttccacttcctaaagttttacataacgtatatttttcatgtattgtatctttgtaatactgtattaaatcagtattactttctttatcttctttattctgcgacaaataatctgctatttttctagctgtaggcgctgtaggcgcaaatattatattctgttcattttttcctatatgttcaagaaaatacgataaataatccaaatattgaaggttatataatttttttccgtacccatatattatatctgaattggttatttcttcacatttcggattcgaattcaacatacaatattgtttaaaataatattttttatctattttgcaaatactataggttagattcaaaaccggacttatatccgtactaatatcttcagtctctattccaaatatactctttcctaatttatcaatatcctctattcttggtcctgatattattatttgttctacattattcttatatctaaattccataagtgtatcaaataaaattttggctctttcatctgtctcttctttaattctttcaatgttctgaatctcatcagcaaccaaaatcattcttttttcaaatgctttttcttcattagcgaaagctgctattgctttctcttgagtcattacatatatacaatttgcttcactcttttctgtaggtaaaaaagtgtttgagattctatattgcgatattttcatactcttcaacaatgtatggaaatcctccgtaacttgatttaataagctgagcgttggaactatatatacaatatcataaatcccattcatcaattttttaataatctttagtaaaataacaaaggactttccagctgaagtaggtgctgatataccaatcactttcttttcatccattgaatcccaaattcttttttgaaaatttgttaataggaaatatttcccatttacctccacctcattactaatttgatttaacccaacagtaatttgatccaccacgctgctaagcgaagtaaacaaacaattttctttatcaaaataatcatcagctataattgcagaagtaggataacctattcttgataatattttcacaacaaaagaacgtaaatcatacttttcatgatttacatatgtccacatcagcgaaatcaatgtaataactaaatttgtgctttctttcccttgtttcatagaagtaagatagtccaaacatcttactgtatcattaattaattggggctctactgccagagatttgtttatgaatcccgccttatttgcaatataataaaaatctatttccaaccacttctgtaacacttcttgaactttttgttccatattctgctcctgcaatttataactgctcttgaaattcttttattaattcatctaacttccatataggaaaaactatatatgtcattctttttagaattatattttcttttatcggtatttttgaattatcaaaatcacgatatctcatttcaataatttcttctatttgtcttctgatatcgttttcatttgtcaaatttattttcttcgtttcatcatacacaattatgcttactaaatggatttctacattttgcagtctcttatccaaatactcctcagcaatttcattcatttcttcatccagaaaatcttcatgcacatacagattcaattcatctctatgtgttttataggtatttaaaatactatttaaagcatcttcaaatgctgcattaaacttatatttgctcgagtacgtttttgcttcacccaaaattattatattttttccgttctcaaccttataatgtatagcatccgcaccaaatctttcatgttgtgatgatgtagtaattttcatttttcttaataatggaactgccttcatacatttttgtataaaatgaaacaataataattctccaaattgcccttgtaccaaaagagtattgccggaacctttacgaaacttatctcttgcccttcgttgaacagaagcatgcgccgttgcctcagattttccttttttcgtttccttttctttcaacaccgcatatttatccgcactataaatccaatcaactatcgtatccattaaatctactaaaaaatcttctcgaagttcttgtaaatcttgatacgctatacttgcaccataatgaacattaccatctggcaaaatatcaaattttttcgatatcacatgaatatcagcaaaaagagccttatttggcattaaccttttagtgatttcactttcctgcaatttacccataatttttcttcatttctttacaaattttatcaatacattgctactatcaaattttatgatggatgagagtttccaatttgcttcacatactcataaatccgtttcaacattccttcagttccttctcccaactgttgctccattttactcccaaatcccatatatgtattgaatccgagcatgtatactgccattgccatcgacaaatcttctgactgattatcgtacacttctgcaactttctgtaattcatctactacagtatcatgtggaactgtaactccaccttcttcatttacaactgaattaataacctccggtaatgccatacacatcttataaaacgcattttcatcacctgtaagaatactataaaactgatccatacttacacggcgaattaatctatgctgcacattctttccatcaaccttcgttgtccatttgatattttgagatttctttgcaatggcttctaccaaaaggcaagcacaatcatcgtcttccaatatctgcccttgcatctttatataagttttagccgaagatgcagaattcattgtattatgcttatttttcatttcaacatatacagtatgaacaatatctccatctggcatttgtataccatcaggatttttatatattacatcccatccttcctgtggcacttcacatcctttaaaatatgcaaatatgttttgatgaaaatagccaatatcattattatttgatttatctctctgtcggaatatctcattatttacaatttcttcccaacttgttcgatatactgatttatcaaaaatcaactttatcggatcaatcaaattactattaaatttcttcaaatcatacgattccaatttttctccatacttcatgattgttgcacgtacatgatttctgaaatcttcttctgaaagaaaatctaaattccaatccattatttatccccctctaatgctctatgtatttccattgcaatttcatatgctaaatttaccggcactgcattccccacttgtttatactgagactgcacacttccacaaaactgccaatcatccggaaatgtctggcatcttgcattttctctaaccgtaaatggtcttgcttccaagggatgacatctttcagtctgcttctgtgaaggagatgtcagtacagtcaacgaaggctcatccagactcatcctccttaatatcccagttcttccaccttccatatcccaacaacttttcatatattcttttgcaatttcaggatcaatatctctccaatatccccccggcgggacaagttcaaatatttttcttttattttcaccataaggtacacccggaccatccggacaatccaaaagtacatctcttaatactggtttataatcatgcgcttctggaaaatgaaatttaatcctattaactaaatcatttctaattccaattgtaattaaacgctctcttttttgaggtactccataatcccacgcattcaaaattctcttttgaattgtatatcctgcctgttcaaaaatattagtaatggtttcatacgttctccctttatcatgagtcaacagtcctcgtacattctcaaacaagaacgtttttggctgtagtttctgcaaaaaagtagcataatgatagaataatgttcctcttgcatcttctaatcccaaacgctttcctgcataggaaaatgcctgacaaggtgcacctccagacagcaaatctaactcccctttttttataccaaaatattcttccaaattcaaacatgagatatttgcaacatcctcattaataactctccaatcaggacgattctttttcaagctatctgatgcgtccttatcgaactcaataagtcccaatgtatcaaatccagctttctctataccaagtgcaagtcctcctgctccagcaaacaattcaattgttgtataatgtttaggaacattctctatgaaattatctctctgtatctcaacaatattgttgttgacctcataaattatcaaaatactgatttacttgcctgtctctgaattgacctgtatactgtcatcagcatacaaaaaggaaaaggtctcagagcaccctcctagcaagttgtgtactctgagaccctggtcactaaaccatggttattatatcagattattcacttgtcctcaaggaggattttggtgttttttgttgagagcagtgtgaccacccatatgtgccccatctgtcaggctacgcttcgttaccgggattcacgcccacgcatccgtagaaaggaaggcggtttaaaagatcagttgatcattcggcggttttattgtaagaactgccactcttatcataatgaacttccggattgtcttgttccgtacaagcattacgaaacagaagtgatctccggggtgctggatggcgttgtacagccggaagacttagattctgaagactacccgtcctgcgctaccatgctccgctggctgcaatggttctgcgaaaatcttgaacgtatcaacggatatttaaggacgatcagggagttcctgctgggttataacgaagagaggatttcccttggttcactgctcgattctttcagaaaccaatatcaaaactggttagaaatcatcttgcgtcagatttacaacagcgggggatttttagtcccgatctgctggtaaggcttatgcacctactttgcatcgtctgtcgcggtaccaacgggtatagtggtctcaaaaggaggtcactattttatgaatacaagaataaacaaacaacaatggcaggaagaagaagccctcaggcgtttccaattgatttctccgcttctccaggctgatctggatgatgcaaaacggatccagctgcgcaaaaagattgcagaggagaatcatatatcggtccgttccctttaccgttatgaaaaagcgttttcggaaaggcagtttacagggctaaagccggctgaccgggagaaacaccgctcacaaaaactccctgaaaactttgagtttctgttggagcaggcaatccagctacgcaaggaggttcccgagcggtcggttgcccagatcatctacatcctggaaacggaagggcttgcagcacccggtgctttaaagcgttctactttggaacgccatatctacaaggccggttacggccaaaagcagatgcagatgtaccaggatgcaaggaacagttcttccaaacgtttctgcaaaccacaccgcatgatgctgatccaggcggatatcaagtatggtcccaagcttccgattggaagaaatggagccaaggtacagacttacctgtcctcggcaatcgatgaccactccagataccttttatcttcccggttctatgataatcaggaagaagcaatcattgaagatacgttccatcaggcggtttcccggtatggaaccttcgatgcctgttactttgataatgggacacagtatatcgcaaaacagatccggtcttcccttgcaaggttgggcatccgtgtgatgtatgcaaaaccaagatccggtaaaagcaaagggaagatcgagaagttccatcaggtagtagatgcttttatccgggaatcaaagctgaaaaacatcaaaacactggaggaactgaaccgcctatgggccatctatctggatgagtattaccacaagaaaaagcatgatggcatcgcagaatactatgaaagccttggcgctgccgttccggaagaagggatctcaccgcttcaggaatggaaccgggacagccgcccactgacttttttggatacagccgttgtagccgaagctttcctgcatcatgagcagaggaaagtggataaaggtgcctgtatcagtttccgcgggcaaaggtatgaaaccaagccggccttgatcgggtatacggtagaaatctcctatgatccggcaaatcctgagatcatcaccatttctcatcccggatttgaaccttttcaggcaatgcctgtaaagattggggcgtattgcgatagacacgctacgctcccagctgctatgcaggaacaaaaaccgacaacttcccgttttctggatgctttggaaacgaagcatacccagagcaggcgccaaatggcagatgcgatttcatttgcttcctacaggaaggaggtgaatggctaatgtatgaatcattctttggcatggaacataccccctttgtccgggacgtccctcccgaaaaactgtttgaatccaatgctttccgggaaactctcggtcgtctggcttatgtggcggaccgccagatgtttgctgttgtaacagctgattcagggtgtggaaagtcaacgcttatccgccggttttattcggaacttccaaaagaggattacatcatcctttatctgtcagactcaaaactgaccccaaggtggttctataaaggtttgctggatcagttggggctggaatcccgtttctaccgcggtgattcaaagcgtcagctgcaacaggagatcgaggtaatccggggcgtacagcgtaaaaaagttgtctgcatcctggatgaagcccacctgttagagaaggagacgctggaagaattccgctttttgctcaattaccggtttgattccatgagtcccatggcgcttgttttagttgggcagacagaactgtgggaaaataaactaaagctacagcggtatgccgccatccggcagcgcattgacatgtactgtacgctgcctcatcttgaccgttctgaaacagaacaatatatcgcaagccacatggattactccggatgcgggcaggaaatatttacaaccaaggcattggatgagatccataaggcatctgcaggaatcccacggatgatcaaccgtgtctgtgaaaaagctttgatgtatgcgtttcaaaatcagaaacgattgatcgatgattatatgatcaagttcgttgtggaacacgagatgcttgggatggtaacttcataaagcaggtaccgcctggaaacaggcggtattgcctaactgactggtgacagaaagttaagcaagtgagcgtcaactgatgtgagcaatctggtgacagctcatgaaatcactaacacaatatcttcaatattgcaatttaaggtaaaacatattttttcaattgattcaaatgagaccggttcatttttccctaatctagccaatacattaaaactaattcctgatgtttccttcagttctgtacgattcatttttttatcaatcaatagtttccataatctatcataacaaattgccatgtatattcctcctagaattcctatgttgtatatcttatcatatatccattttatccgcaagaatcctctcactatatcgttagatttcctcctgtttgtttcttttgattttcttgctaactataatctctttctccacaatctccctcgcacacgcttgtatattgttcattctcgctacccattccatctgattttctgcctttaactgttccgtgatcccatgtgcctgtttcatctgctctacaaccctttcaaagcgttcctgtgcctgctcttctatatcagccaaataatcattcagcctgccgcttgtaagcaaattcaaatatacactcctgcgatattctttcagataacgtaaatgtctttgtccccatacacctataaacctctgttcctcttcctccggcaaggtaagacaggggataagataatccccatgtccgatataagtgccacccatttcttcaaatattgttttcttcataatcatttccacctttcttatcgttctctatccatagattttttcttaactgaccgttttggttgctgtctgccttcctgctgatagcggtgcagtttttccaatacgcttgtttttttcggttgttctaatggattttctctcttctgatccgtctgatttttccatgctcgcagttcttcattgtattccataattaacgcttctgccttgttataaaccctctgaaaagcttgcacattgggatagccttcccgtttcacgatctgttccaaactcttatgcagacgtttttccaaatcctctaacagttcaattcgcccttccagagattttcgctctttgcctttaaagaaccctcgtaactctgacagttgctttttcaaagaagaaatatcttgctgtgtacgttttatctcccttgactgcccctgtaattcatacataatcttctgcatatctttccattcctgcaaatcaatctttggcacaggttttggtggcagcttaaatttaaaaattacttcctgcaaaaagtctttcgcacctcggataatctgacggaacatatccggcaaccaaccgtgtgtcctgatggattgtaacgttttatctgtgattttttcctgcttgattttcaaaatatcttcttcgggaaccccctcaaccaatgccacatcaactgtccgattccattcctgccttgccgcattgtccgcctttatctcctctgctttcggattgttctttccgattttcttggtcgccagatatacgccgccctgttggaatacggatagtttttctgattcttcttttacatatcggttgatcgtatcggtaaacagttccttgacttctttggtaaaggctttgttcttaaaccattcatcctttttcgtgaagatatggctttcataaacttcccctttggggataatactgcaccccgcccgaagattgccctgctcgtctaaaatttcttttttcgtgcgcctatgcttcccctgctcatcgtaaaacatatttcggatagcgattttcacttcgggttgttccagcattttccgttcactgaatacaagatgaatatgataattcgtctttgccttgttgtgatgaagggcagcactgcactccacaccatatcttttatgaaaagtttccgtaaaaagtcttaccacatcatctgccctgtactgaacaaaactttcgggaagtgctatgataaactcacgcccttcaatacattttcctgctgaaccactcgccttaaagtccaactgattttctctcgcaagatttttccaaaactccagtgttgccccttctgtctgataggtcgcatagagatattcctgtcgtttcggattggagatataatcaatccttcctgccacatcggacagcttgctttgtctgataaatgaatgtctgcctataagcatcctccttcctcgcctctcgccgactttattgtgagtaggtgcataggcacctgtttacaagcctatccgcctatcggcggtttgctcccggcagggcgaaatacgcagagcataaaactttagttttgtgcgatgggtgtatttcgctctcaaacgccgagggctatttttgtattacataatctgattactactcagacttgcgatttcatttatgggcgtatccgccctttttatccgcccgtatccgggctgctttttttatgactgacagcagattatctacggtactttcttcccatccggcaagccatatcagggttctttcctctgcttttgtcagttctacgcctgccagtaccttgttcattttttgtatctgtctgccctccatcttataaaataaatcattcacatttctgcttcctctttccggctactttaacatccgtagcactccttcctgccttatctgttatttacaggtgcgtggcacgctcctgtttttatcatcaaagaagaattaccaacgaaatttctccggtactcctcgtctgtccaaatattcttttcttgcctgttcccgttcttcctctgcgggcgcagttttgtattttgaatataagtctctcattaccaaagcatccaacttcgcttctaatccttgttttatgctcggtaaattttcttccacatctaacaaatggaattttacaagttccataaataactgctctggtatctgtatctgtttcatacggtctcctttccaacaccgcaacaatgcaatgtctttagtttttgcaaccttacatttacgtctctgcaatttctatacactctgcattgttgcgttcttatctacggtttcacgatttcatcaagtttccaataccatgattctccaatccgttttcctttaatacccaactcttttttcgcattttccaatgttcgttttgaaattcctttttcttcggcaagactaacaatatcctcacttttcaccacgctggttgtttctgccagttcataaatgagttgttttgcccgctcctttttatttgctttcggggttactcctcccaacaattcgtctgccgtaatttcataatctcccaaccattgaaatccttcttccatcagttcaaatgcttttgaatgtccaaatgcggcaaggttattttttatttgcacaactgcacgtgtattttcctgtccctctattctaccgactaaaagaacgcttcttgctactgcgaaaaagtcaatcgaacccattcctctatatgccgccttgtttccggcagccttattcatgtgaccgatcaggataatggcacacttatacttctctgctaaaagtcctaatttcttagtcatatctcttgcttcatttgcccgattcatatccattccgccgcccagataggcttgtatcgggtctaatataagtaatcgtgcattggtttgaataatcgcctgttccaaacgttcatctatcatagaaagggatttttcgctttcatcaataaccataattttctcacaatcagcttctgccgcttcaagtctcggctttactgtatctgctaatccatcctcggcggtctgataaataatattcataggctctgatacctgcatttcttcatccagtccgataccctttgatattttagcagcaagattcaatacaagtgttgtctttccatctcccggatctccttgaataattgtcaattttccataagggataaacggataccataaccattcaatttcctgtgactgtatatcagccatattgattattttcaattcaattttctgttcttccataaagtcctccattcaaaaattctgttgtttctccggagaacctctgttatactgattttgtaaatatcttgataacaaaggttatccgatttttcataagtcctaacagttgccgctgtcgggacttttttctgttccctgccaaagatatttcgccccgtctaatatccatataatagctttcagcatatccagacagtcatttttcatctgctccaacccttcgtctgataacaggatttcctgctcttcaaattgctttaggatttctgcaatgttgtactgcataagttgtaattcctcaaccagttgatatatcacttcctttttcccgaccacgcacactttgttatagatacaggaacggacaaaataatcttttttctgcataccgcttgctttgatttttgcttcgatttcatccctctctcttggagaaatacgaaaactgattgttgggtatttgtgtactccgctcatagctactcctctccgttggcaatttccaacttcgctgccaattctgcttgtttattgggatacaaatgggaataagtattcaaggtagtctcaatcttttcatgccccaaccgttctgcaatcgccaatggctgaaatcccatttctaccaatagagatgcatgagaatgcctcaaatcatgcaggcggatacgtctaacacctgttgcttttatacccctgaccatttcatgttccataaatgattttgtaaatcgaaacattctttctttatctgtaattccatacagcatactgcaatactcctttagttcttctgccaaaaataggggaattgttatctttcgattgcttttaggcgtcttgggcggcgttatcatgtccttaccatttattcgctgataggatttgttaatcctgatacaacgcttttccaaatctatatcttcgtaagttaaagcaagcagctctccaattctcataccagtccaatataaaatcagaaatgccattctcgcttccggcttgttttccatagatggcagaaactctttgaactcttgttttgtccaaaaatccatttcatcagccttgctctttccgatacttcctgcttttctgcaaggattatctcgcaaatcataataacgtacagcatagttaaaaagagctgccaactgattgttaatgcttttcaaataagttggggcatatccctttttaatcaactcattctgccatgctctgatatctgaggtttgaatttcacacattttcttgtgcctaaaatatggagttactttcagatcaaacacatatcgcttattgataattgtgctttctctcaagcgattctccatatctgcaaaataaatttccacgaaattttcaaaactaatatccagattcttctgctgttgctgaagaaaatttctttcccattcatccgcttctccttttgttttaaaacctcgtttgttcttttttcggcgtattccctgccaatccttataataaaactgactgcgccataatttcccgtctcttgttgccggcatatcatcatcccctttcttctaaactaccattccataaaatttttcctgaaaatactttcttggcacttttcccgaaatcactcgaaatccctttgctttcaactcatcattcagtcctcgaataactttataggcataccctctggatactccgagtaattcagcaacttcatctgcggtaatatacattttcattgtattctccatattcatttctcctttccgttttaattccagtacacttttgtgttccttttgttttgtattatacagtacacatttgtgttcgtcaagtatttttcataatttttatacacaaatgtgtcccgatgtgctaaactatctctatacacacaaaacacaaaaaggagaaacactatgactgtcggagaaaaaatcaaatattatcgaaatatccgtggaatatcacaagaaatgttgggaaatctttccggcataaatcctgctactatcaaaaagtatgagtatggtattcgtaatccaaagccagatcaattactgaaaatcacaaatgcccttggcattagcattaacctgttcatggactttgatatagaaactgtatcggatgtgctttctttactgtttaaactagatgagcaggtagatatgaaatttgaagtggaaaaggataagaacggcgagtttatcccttctactgtaaaattatcttttcagaatgctgcaatcaatcagaaactttgcacctatctgaaagcaaaagaaataaaagaaaatctagaaaactctaaagagaaatttagcgctgaaaatgattatacagaaactatcaatgagattgagcagaacatagaagatattaaaaatcatcttgtagacgataatatggtagtcaaaaaaggaactgacggaattactgtaaaattatattctgacgactaatgaggagatactaatgaaaaagatatttagaatgccaacccccgttaaaattacaggtcgaactcccagcattacaaatgcctttgttaatggaattattcctgttattgaaccaacagaagaagaaattgaatctgctttagaaactttaggaatggataaagatcacattgtttgcgcatactgtggaaatccatataccgaatgggatcattttcatcctttaataaaagataaaatgccaactggatacatatccgaaatccataatctagtccctgcctgtggaaaatgtaatcaaagcaaaggaaacaaatactggaaaacatggatgctaagtgacgctacactttccccatcttctcgacgcattccagatatagaacaacgaataaaatatcttgaagattacgaacagaaatatattcccctcaaaattaactttgaagaaattgttggtaaagaaatgtgggagcaacattgggctaattgccaagctctacacgacttaatgcaagagagccaaaaacattcagataagctaaagttgattattaaaaatatgctttcataggagaatgcttatgaataatttcaaaaatacattccacaaaattaccattttatccttaattgttttatcatgtttgaatctttataattcaatttttagtaacatcagtttaatttttcttactgaaaatcagattttatacatatattcagctttagcccaaattatcggtgcacttctcggtctaataatcgctggatatagtatcatcgatagcaaaatcaaaactctgggcgatgaggatcacacaataacagactatactgatgaattaaggcatgaatactttactgcactaatttacataattgtccttagcattatggacatcctattttgtttaattgtactgagcatatataataatatttttcacatttgtctttccttttttatgactgaaacaattattattttcgtttttataatgatattcactttccattttgtgtgttatttgaatccttcaaaattacaagaaaaaggaagtattgaaaaagaagatattgaaaaagattattcatcactcacaacggaacagacagatacctttagcccctttgttacctattataatcttttagataaattagttaaaacatatgcctgtgaattaactgataaccaaatttcagtttataaaatacagatttttgaagctttagatattcttttacggcatgaaatcataaacaaggaaacttataatcagataaacgaattgcggcgctatcgaaatgcccttgtacacagccttgacacagataaaactgtagaaaccaatatatataataatctagaaaaaatatatacattattaaaagctatttacgataaccgttcagataataatctttttgctcaaaacaaggctaaattatacgaatactcacataatcaaggctatggttccatagaaaatgaaattttactctttttatctactcacacagcatcggctaatgaaattgcaaaccacttaaatataagtcgtgcgtctactgtaagaaaactacaaaacttacaaaatctaaatctaatagagaaaacaggagccaacaaacagctgaagtggaaagtaaaatagtttaaaataaatagagccaaagtagagccaagaggcataaagaaacctcggaaacccttgtaaaatgggcatccgaggttttctgtccgttattcaaactccagacagacagtacggagtattaacgcatatagacgattttaaaggctttttaaccagttaagagcaacatagccacataatctaaattttaaaaatgcaataaaaatgcaatgagtgacacgactacttgctatacttccatcggcttcttcttgataccaacactatgaaaagtccgattacaattaaatatactttgaaaggaagatcaccatgaattacaaattagaactcaaacaaatcgtggaatttccacgctgtcgcatttaccgtgacttcatacaaactttaatcactaccaagagcatccgaactaccgggggctcttttcttttttattatctggtattatgctcctatgcaaattaccgcacatcctaccgccggatggaacacattacctataccattggtccaggagagtggatctgcacagtcacagatcttcaggaatggtttcgctgccgtttccaacatcaagcgttgtccatccttcgattttttgaagagcagaattacattacctactctcttctcggcaaaaaccgcctggtcaaattcaaaatatcagactggcccaaagacaataccgtattggaatacaactatccctgtaaaaaagatacagggtttttctttttcccgattgccaaagttcacgaactaattggcattggaaaatgctcggaaatggatgttattctggatctgtggattcatgcagtttacaacgattcctctgtcctgggatctgattccggtcccattgtctattaccgggataataccggaaatccccttaccagctttaatgaactgggtgaaaggtggagtctgtcaaaggcatcggtatcacgactcttgaagaaactggaggaaaaagaatacattacacttatctcatttacaggaaaacacggaagcgtaatttatctcaacaattacctgtccgtgatgtttaatatcagcgacgttatgattgacaaggaggagatcgctatgaagatgcaattaccaatccatgtaactgaagaaatcactattgaggattctgcttctgttagcgtttcagaaactgtcacagactcacaaatcaccgttacaaaaaatgattcctgcgttccagattcacacatgaaatttatcgtgcaaaaagtcgcagaactattggattcacaagggattccatgttgccactgctccaaaacccgctatatattatctccattatcagcctgcaaagatatatttaatacatttactctaaatattatctgtccctacggaaatgccgcttatcggtttgagttgtccgtaagtccaggggatgagtctgcccaaaagatgcctgccgtggcagagccttctgcactgaaagggggggaatagacatggcaaaccgcaatacacagggatttccttcacccgaagaagatccacgttttcacgacacctatcagtttttacgcagataccgggatgcaacctacagcctgaaggtagtcgtacaccagatggagcaccagtttaagctccaatacgacaatgacatcgacaaatttctggactccatctatgctgccggggctgatcttaccggaagcgacatcgaacaacgggcaaaaagtattgccagaagcaaccagatgctgaagcttttggaatcatccatcgatctcctccggaacaatcacaagcatggggaacagtattactggattctctactacgcttttctctctccacaggaaatgaaaaatacagatgagatattggataagctggctcaccacatcaccaatatttcctaccgcacctattaccggaaacgcagggctgcgattgaagcactcagtaccatcctttggggatttactgcaaaagagacattggatacgctcaacaagttctttccagagtaatacatatcgcctatctcctcggcttttcgtaatatcataaaaatgttatactaaaaaatgcaaaatatatattgactctcacggaacgtcatagcgtacagttatcttatcaggaacaggaggtcagcaactatgaggacagtcaaagaaatatcagaacttacaggtatcagcgttcgcacgcttcactattacgatgaaatcgggcttttaaaaccaacacaaaaaagtgatgcgggataccggctttatgacgatagggcattggaaatattacagcagattctgtttttccgtgagtttgacattcctttgaaagaaatcaaagctgttctggagaatcctgctcttgaaaggaaccagatcttgcaaatgcagagaaaaatgttggtagcaaagaaagaacgtatggaacatctgattgccagcattgatgatatcctgaaaggagagaataaaatggattttgcgatttttagtaaaacggaagttgaagaaatgttccaaactatgtttgaacatatgcctgacaatatgaaagaacttgctgtaaaagagtttggaagcattgaagaatggaaaaagcattatattaagaccgtttcatcagaagaaatgcagaaaggctatgctaaagttgttgagtggtatggaggaaaagagcaattcctgtctgttgccaacaatcctattagcaaagaggctgcagaaagttacaaccaacaatttgacaatcttttatacaaattagcagctaaaaaagtatgttcaccagattcttctgaagtaagagaacttgtttccgaatacggttttcttatgaaacaactttcacagataaagaaagaacacggtctgatggttgcacaggctcaatattaccgtaatgaaaaaatcaaacctatgatagatgaaaaatacggcaatggtacagccgaattcttcgcacaagctttcgaagcattttataaagacaagtaatcattagaactacacaaaagcacaacaatacaccatgcagggaatcaaaatggtttcctgctttttttatgccaaccagtgaaaatggcacagaaatgacctgcttctgcgattgaagcgtaaaattacccatgctacaataggtattgcttatagttttccttatttccagcacccatagatggtgctttttttgtacctgtaaattcaatcgctgacagcaggttctatgtactttgtacgtacactatacttacaataccaaacgtattctgtacgtacagccatacatataaagtttcctattatatatagaagggagtcaatcatgaaaacaaggaacgaaatctatcaaggagagggagccaagctcttacggttcattaccacttaccatactctgaggtatgaccaggttttacaacttttctcccgacatgagcagtctatcaagtcattgattaccagcctcatcaaacaagggcgcatcatttacgataaagagcatgaccttctttgtgacagccagcagtctgctgagaatcctgactatgctataattacatgcttctgggtactgctggattttaagaaaggtgttgtataccacaccagtggcgaatttccaatcaagctcaatttcttttcgcaagatgaacaatacgaaatcatctatatcggtgaagaacaggaggctctgatcaatcatgtgatggaaagtatcccatcaaatggttccaaacgcctgattgtcttagaatccgaaagccaggctgccaaaatcaccattgatgatgtagccgcttactgccttgtaaatgaatccggtgctgtcagttactacatgagaaagtaggttattatgacgcaaaatacaccaaccatttaccagcggcttgaaaaactggaaggggagctgcaaaaactgacgaataccgtttacgctctgaaggtcactgatatccagaattatgataaaaattttgaggaactgagcgtcagtgctgctcttcgggcggagcggattgcctgccagatgcgtaaccttgtctgtccggctctctccccaaatcaagcagcttatcttcccaaagcggcagatgcacagggaatgcggattgcagaacagcaggggattctcaccattacgcttcccggactgcttccgaaacgaagagtccacacaaacactgcatttctccatgaaccgcttaattatatgcttcgggagtatgtaaaacaaaatgccctgcccctctatcgtgactgcgtgatatgtttcagtcaaatatatgacagggaacttcctcaaagacgtatccgggattatgacaatctggagtttaaacagattctggatacactttgtacttatgttctgacagatgacagcggctttttctgtgattcctactacacgacacagcttggcttaaaggactgtacactggtatcggttatggaaaaagctgactttccgaaatggctgcagaaccagaaaaatcatcacgaaagcatgtcggaaaatctcctgacttctcaggcagaaatccgacatcggtaagaaccaccgcagggaactttgttttcttgctttttttatctccaaaccaccggagatttacccaagtataggcttgcatgggtaagaactgaattgaggtgatgcttatttgataagacctgacactacgaaataccgcttactggaaatgatagggatgtgcggggaatttcccgcagaccagctaaacagactcatcccaagtgcctcctatgcggaaaaactcattacggatttgaaggcggaacacctcatccgtacccactaccgggatgctctcagaggctaccgtcttacaaaagctgcgaaagaaatgctgttatctgtctcgccgttacgcttccagtgctatctgaccggcaataccgagacgaacctcatccgaagtgaagtatcccgacgtatccgcttacatcagaaagccgaaacgtatctgacactccttcatgccgggattcccttttatccggatgtaaaacctgacatcttctgtaatcaccgcgaagctggttccatcggtatgcgaagccttcctcttttttacgcttccagagaaattaaggaattgggcccggagaccacgaagattaggaactcccgcagcatgggcatcctgatggcaccgcaatgtgtctatgtcctttacaacacgggaaacggagtcctgaaatgggaatatcgaacggaagtccgcttaaacgccttcctgcagcattacctgcaaggctacccttacaacggacatccacagatccgggcaatcatgaccggaaccgacatggaaatggctttccggctgtttaccagtaccggaggctacaaaaagagcctgtttatgctggacacctccttcgagcatttccattaccttcccaatactccggaaggggaagtgcttttaaaactgctggttcaccctgagatcatggaaaagctggacaacctcctgctgtccgatctgggctgccgcagcgattcaattccactggaacatgatgccacggatgcttccgggaaccccatccttcttgcttatgattttgacatgcagcgaatcaaccggttcaataccggcttaaatgtatacggcagatccgggaacctgatctgtttcgattttcagattccggtcctgaaaaaatacttatctgccacaatccatttctccagtattgacctttgcaaattcaaaagggggtttttacatgaaccgtaaatggtggaagctcatttatatgcttccgattaccttctgcaccctctatgcaggaggctatgttgctcaatttatccgcaactatcagacctgggaatctgccggcaattttgccggaaacggaactgccccgcagatcccctccccgaacccgctcgcctgtctggatgccctgactgctttcccgtacaatctgtatgggatttttctatgtctggcagcttttggactcctgaccttccttctcatgcgtatgggatttgaccgaaacggggaaataacagaccgggaccggaacctgaattattccacaaagggaacctatgggacttccggttttatgactttggaggaaatgcatcaggtactggagcttacgaatgatgtcaagaaacacaagggaaccattcttggaaaactgaacggaaaagccgtttgtctcccgaaggatacccgcatgaaccggaatattgccgtttacggtgccagcggttccatgaaaagccgggcctttgcacgcaacatgatcttccagtgtgttgcccgcggggaaagcctcatcatcaccgatccaaaatcggaattgtacgaaagtacagccacttaccttgagaatgccggatatatcgtgaaatcctttaatcttgtaaacccggaaaactcggatagctggaattgtctgggtgaaattagcggacaggaaaccatggcacaggtatttgctgatgtcatcatccagaataccggttctgccaaaggcgatcacttctgggacaatgccgagatgaacttattaaaagctctgattctctatgtggatcagggattcccaccggaggcaaagaatatcggacaggtatacaaactcctgaccatgagttcggaaaaagaactgaacagcctctttgacctgcttccggtctcccatccggcaaaagtcccctactgcatctataaacaggcaagtgacacggtacgttccggcgtcatcatcggactcggttccagacttcaggtgttccagaataagctaatccgccagatcacttcctatgatgagatcaacctgacgctgccgggaaaagaaaaatgtgcatacttctgcatcacttcggatcaggacagcacttttgattttctttcttccctgtttatgaccttcgtatttatcaaactggtccgttatgcagacacctatggggaagatggaaaactgccgattccggtacatatcctggctgatgagctggcgaatacgggagcaatcctatcgctcaacaaaaagatttccgtaatccgaagtcgaaacctcagtatttcctgcattttccagaacctgcctcagatgcagaaccggtatcccttaaaccaatggcaggaaatcatcgggaactgcgacactcagctatttttaggctgtacggatgaggtaactgctacatttatctctaaccgctccggtgatgtgaccgttggtgtcagcagcgaagccaaacaattaaatagctggagagtatccgattatacaccggaataccgccagaccagatccatcgggaaacgaaagctcttaactccggatgagatcctgcgcctgcctctggataccgcactgattatcctgcgtggccagaaagtactgcaggtagaaaaatacgattacaccctgcacccggatgcccaaaaactcattccccggaaggcttccgagcatattccggaatggagaaaaggagcatgtagtgaagaatatacgtacactccgactattcctgcttcccgcccgaagagaactgcttcttatggaaagcagaaaaagaaaaaaactgaaccgatttttgaccagcaaagcgtttatcaggaacctgactatcacgatttcccggatgacttctcagcagatgactatccgtatcacacagacatggttcctttagataaagattctatcatgtcataatttgaaaggagacactatgatgccaaacgaaacaaccaacacacctattttaactctggattccgatacaaagctggaaacagcccagtccatttcagaccttacctggcatgagatccagaatgcctaccgtacccgccggatcttaaccggaatgcttggcggtatcgagaaaacagaaaacggcagcctcattgccgtggtttactacaaggatttccgtactgtcatcccggtaactgagatgatgatccatctcatgcaggatgaagcacacgattatggggagcttgccctgcggcagaacaaaatcctcaacaatatgcttggatgtgagattgattttctgatcaagggattagatccgaagacacgcagcattgtcgccagccggaaagaagcgatgctgaagaaacgccagatcttctatctggataaagatgcttccggaatgccgaaagtttatgaagaccgtatcgtgcaggcaagagtcattgccgttgcggaaaaggtagtccgggcagaaattttcggtgtggaaacctccattcttgccagagacctgtccttcgactggatgggtgatgccagagaacgcttccaggtaggcgatcacatcctggtacgcatcctggatgtgcgggcagactcaccggagcaggtcattgtccacgcagatgtcaaaagtgtggaaggcaacaccagcaaggaaaacatgaaaaaatgtaagattcagggaaaatacgccggaactgtggaagacatccataaaggcaccgtctttgtccggctctccatcggtgtcaatgccattgcccactcctgctatgacaaccggacagtcgggaaaaaggatcaggtatcctttgtggtgacgcatattgatgaagagcgtaatgttgccctcggcatcatcacccgcatcatcaagcagaccatataaggcttccaccttatttttaaatagctttttttcatatacagcaccaattagtccagcaaatacacacgatacagctacataaggtgacagaataaagtatttttcagaccattaccttattgtactgaaaacggtaacgtgttatactgattcggtattactgaactggaaagacggatgcatttcgatcttgccctctagtaacaaaggagggtgatgcccatgaatacaatggaagtattgactttactattggtaatttttgcggctttgacttatatagatcgacataataagaaatagcatccacgaccctaggaaagttttggatgctatgtcttatacatagaatataaaatttaactgagggcatcagattttgcatctgaatacctttcttgagttcattatacactgggggctttgagaaatcaagtccccctttttattacgacattgattagtacctgcattaaacatcagaaatttatattcttactcactgaaacgaattctctctatcaatgaatctttccttactgactttgcaatgaatattgccaataacatctgtatcacaaacaatgttaaaattataataatagctgctgttaccggataatggtatgtgctgatatcaaacattcctgtacgctttgcatataaaaacaacggatatcctgcaagacttcccactccgatactgataataagagtgcctactgtatagaatataccttccaactggagcatcttcatcaactgacggtccgacattccgattgcctgcatcatgccaagctccttttttcgcacatggacactattgatcattgtgttaatcaagttcataatgctgattgctgccagaatgatgataaatgcataacatgcacctctagtcatctgtatggcattttcccatgtatcgtactcattcttccaggtacgcatctgcagtctgcctgatccatccacaatagcctgtagagatgcttccagtgcctcatcataatccttatctgcaatcacctgaaaatagctggaagaattatttatggtaagtttctctgccccttcttttgccatgataagacagttatagtttgtcagacctcttccatattcaccaattgctgccacttcaatctctttttgaaaggtattatctccatcatgaatattgagtttcagcttatctcccactttaatatctggataccagtgaagtagcgcgcggtccagaatcactttatccccggatttcaattcctcgtatgtgacattgccttcagtgattccttttttcagctcttctgcgtattcttccggcactccattgataaattcggttccaattttttcttcaaaaggtcctcctgataccttcaacgcggtaaacacatctacccgctcaacaccgtcaagctcctctatctgctgctttagtccttcatttaatggattattcttttgaacctccgcccattcatattcaggatgctctttattcccggattccacaattggagaaatctcatattgccccacaatcgaactctttgcactttccatcggatttgcacaagacagcaccgttgctaccatcatgacaaatattccggtaacggccatagatacaatcgtgatagtactcttctttttattctctgcaagatttctcttggtcagtcgtccgatattcagaaattgatatcccttcctgctgcttttctgtcgcttactgcctccctggtaacgcatagcttctatttctgataccttcgccgccatacgcataggcttcatcagtgacagatacactgtacacagagtcactgcaattgccaacagataaatccaccaataataaagttggacttctcctttagctacaaccttgtatgcctctgttataagtacgtttgaatcctttgcatgttctacaaactggagaagtacaactttcacagcaactgttccgatcaaaagtcctatcggaatggcaaacaacgccactcccattccctctcttagtacgatttgtctaagctgccgtttcgtagccccgattgcctttaactttccaaattcccgaaccctctggttcatagatacataataaacactataaattgtgataatgcccgccaatacaacaataagcatgattcctacaatcaccggaattgtagccggatccacataatttgctgcaagatactctttattaatattcatgtcatcctcggaaatcccgaactgtctggcaatattctgtatcgtctctgtataatctgcagtcgtatttcctttctgtccattcacctgaagtaaaaaccgatatttcacctgttctaccggtatctccgctttcagaaaggcctctgaaaccaatgatgtatattgtttttgttctttgctgctctcattatctgctaaaaaaccacagattcgaaagtctttctccttcgtataatccagtccgtcatctttcagaatctgataaggtactgtgatagtgtcaccgattttcccattctgtcctaatgcttccagtattccttttgaaaccacaatatcattttctttctgcggaagttgcccctctttcagcttcactttataaagttccatccctgttctgtccatatacatcatggaaaccgtcgcatcttccagattcatgtaccccgcatcgctgcggagtccgtaagttttcacatcatgatgtgccgccagtttcataactgtactctcgtccacgttccgataaagggcatgccatgttggataaatcttattgattaccgcaaagttcacttccaccatatcttttccgattgatgggattacgaacagcagtaatgttgtcaggataatggcaattccaatcagtatgtttttgctcttataatgccgcatattgcaatatgcaactctggtcgtcatcttcattatcttctcaccgccttgccatcttcaatgataatcatttcatccgccatctgggcaatcgtttcatcatgggtaatcatgataagcgtctgcccgaaatccgacacgcagcttttcaataggctcataacctctagctcagtctgggaatcaaggtttcccgtcggctcatccgccaaaattatcgccggtcttgtcaccaatgccctggctatcgcagttctctgtttctgtccaccagacaaagcagacggcatcgcatctttcttatcctgcagtccgatttttttgagaatatcttccacttcccgcggctttaccttgcgattatcaagtcccagcggaagaacgatattctcccacacattcagcgatggaatcagattaaaatcctgaaagataaatcctatcttctttcttcgaaactgtgccagtttatcatcttttcgagaatagatatcggttccatcaatccatactttgccggaatccggtctgtcaagccctccaatcagatgcagaagtgtagattttccggagccggaacgtcctacgatagctgtaaacttgcctctctctatctgtaaacttgtatgatccacggctctcacctgattctcgccttctccataatactttactagatcttctacttttaaaatactactcatatcttcaagtcccctttccatttcatacccctactataacattcctgcattacaaaacccttacaacaaccataacagttttgtaagggttccgactattctcctattatgagcggcagtgtcactttaaatatcatacctttctcagcctttcttttggctgctattgtcccccctgttcttctatgatctttctggcaagatacagaccgacacccgctccgtcttttacctgttcctttgctttccttccccggtaaaatctctgatagatcttatgcagttcctccgcaggaatgcccattccttcatcttctacttcaataagcacattgcttgctagctcctgcgtcctcactgtaatcgttgtatgttccggtgaatatttgactgcattctcaaggatattcgttaatgcttctaccgtccattttgaatcatggttcacaactatatcatcatccatctccacctgaatggaaatatcttttcctcttgccttcatataaatctgactgacagcctctgttagcgttttcttcaggctttcatgaagcgaatgtatctggatcatatgtgtttccagccttgaaagatttaccagttcattcaagagctgttccagtttggtaagttcctgtgattcctgctccagaaactccctctgttcttctcctgtaacccgattttctgccaccagctcatgactcatccggagtgatgcaagcggagtcttcaactgatgggaaatatctgtaatcagactcttcgtaccattttcttcctgctccagacgttccttcaaatcttcgaaatattgccccagctcctttacagattcccacacctttaaccattgttccgattctgatgtttcttcaggatatgtttggaattttccttttctgaattcctgcagacattcatataattgctgtaattgttcctcatcaccgtatctgctccagttttttcttcggtccaggtacaagaacaggctacatactatgactcccactagtaatccaattccccagataatccttataaccacatctgaagatccactccctgagtgataaccataagtttcttccagcatctgtacgactctttctatcttctgatcgtcccggtctcttataaaatctactgttcctgacttttcccagattgcaactatttccccttccagttcaggatgttctgcaaggagcagtgctatctgcgttgctttcgcattttcctcatactttgttatcagatacattcctactgtaaaaaatactgcaaagattacatatacgataaaataccgttttaatttttgtttacctttccggtccatatatatcccagtcctctcacattcgctatctcttctgttccaagtttattcttcagtctgcttatattgacagtaaccgtattatcatcgacaaattgaccgtctatatcccatacatgctccaggatactttcttttgaaacaatctgtcctgcattctcccagagatacagcaacagagagaattctttcttacttaaagtaactggttcatcccctttatacacctgcatcgttttcatatgcaccgtaatctctccggaagacataatctgtgcctgtaccttagaaagccgtctcatcaatgcgttcaccttcgacaccaaagccatcagtgaaaatggtttggtaatataatcatctgcccctgtatcataaccatttacaatatctatttcctgatccaaagccgtaagatagataagatatgtatctccacctgcacgtaccatccttccaaaatccagtcctgtaccatccggcaatgtaatatcgctgataacaagagcataatctcctttttgaaatgcttcttttgcttcctttattgtataaacctgacgaacctcatacccttcccgtgaaagtaacagggcaattccccgatttagattcaagtcatcctccagtaataatattttctgcatcaaatactccacctctatttgtaataacctgttcttttatcatatcagtcctatcttttgtctacaataaaaataaaattaacatacatacttttccttcatatgttcaaggatttcaccggatactgcttcagaaatcgatcaatccatttctgattgcttctctgtaacatccgaagtctggataaaagctgtagacaactgcagctctatgttactaaagtcctatccatcaatacaggagttatagaatgccgtgaagataccgtcaaattccatttcaataatatgtaggctgtccattgtgtgctccagataagtcagtgttcctctatccaaatctatactcggctttcctagtgagtttgctattacatctggatttgtaattccaaacatctcctttatatccggcataagataatccacgatatccggcagccttttctcatacgcctgtgccagttcaactgcatgcttctcataatcggaatgtatactgtcacagacaaattcaatcccgtttatttccatcttatagtaatcattattctcatcatagacaaacgctgtacccttactttttttatttttttccaaaatccccatgatatatctacactttcccggttcttccgccatacacagtctaaaaaactgtaacttaatgcttacgtttgtaaaaaataactcctgccaaaatcaataaaataattccaactacaatcataaaaataaaattatcaccatttaacttccctgctatgaaaatagaagtcgggccatccgcaccaccaataacagaaacggctgtgttttctttctgcttcagtacaatgccaatgactgccaatacaattcctaaaattccggctatgattcccaatcgctttttcattgctaccacctcaaatcatttttatctgctcaatcaaatgtaaattgttatgcaagtatttctatgcaaatgaagcatagataacccatatttctgcaaacattaccaataaaagtacaccatctatcatccaattaaactgaatgtccgttaagaaagtttttgaatgtgtcaggcaatattttactttttctcgtccagtcaaaaaagtgataagcacttgtaatataggaaataaaaatatttgtatttttcttccataatcatccgcaatcccatttgcaaaatgtactggaataatactcggtaagaaaaatatacttacaagagcaagcaaaaatcctattatacaaattatccatgtgaattttctagtattgataaatttcataacaatccttctttctgctaaattcaagtttttccaatacataacacgtacttacattatactcctcaccaatgcaaacctcaatttattctccatcctttttcccgttattaagcttcgggcagtaaaatgcctttacttccaccccatcttcctccgactcaatttccacataataatcccggataaagtatcccgcattatgctcctgaatggcgtacagctccaatgtctgaaaatccaccagtaccagatcacggggcttgggtttttgcgtttcctcacagaatacctccatgctttccaccagcttatccaggcattcctgacacagatggttctgtacttttttcacatcgaagatactatcttccccgtaatccaccgatacttcggaaatcccgtaatccgacatctgctccgtatggaaaaagcagccgccttctcctgtcccggtataacccatatgcccgtttccctgcgggccggtaagattcccgtcctcatcatgattccggatatgcatatccatcacataccagtgattggtacagatcactcccagatcgtcaaacttccggaaataatccatcatactccgttcatcgcttccacacagccagcactgttttggatctttcagcttgctttctactgattcaggcacctttctttctaccgggtgatattcctgctcctgtgttttttcaagataacctgtcagatccagccggctgattcccagtccgatcagaattcctgacgcacatgccaataatcccacatatccctttttcatattatagtcatcctttaagaattagttttataatgcttttaggattactatatcaaatcttgcaatcactttcatcataaatcgcatatttttatgtgttttattgcatatacagctttcaaaaaaactgcctgcggcaatttcgcagacagcttctatttcatcatctcttcaattatcacatccagcatccgaagcacgctttcctgcttcttcggtgtgagcctttccagctttccttccactacagaagtatgttccattctggtaagaggaatcacttccttcagcacttcattcggttccgcacctaatacattcaacagctttacaaatgtttccatcgtaggtgttttcacttcccgctcaatcgcacccagatggttggtactgatatccaccagttcagccagtctctcctgcgtaattcctgcctcttccctgtacctgcggattgcctttcccattcctttcacacgcacacctcctccttccagtattcactaacgcttaaagcattagtcatgtaaatccagtataattggttgcaaatcacgcttacagtatccataaggattgcatttataacgcttttagcgttggtcacatttttggcactccatcgtctgtaactggcacagtcctgcgattgtagcggtaatttacccatgttaaaattgatattgtcaaaattatatgcagaacgaaacgcagcactgccgtatgggaagcctctcctgcggcaaataagctgcgttttttctgtaagataggaggatctttacaatttcatactttgatttaggacgcagcctgcattgaccgggctgcgtcctttcttgaggcaggaaaaccataagcaaaggcaggggaggtaattctcctgccgctcttataaaaaggaggtacttttacgtgaaacacaaactgaaaaacgctccgccggacacaaaacggcatgtcaattatggcagatgcctgtatgctgcatttctggctgtcacagtcctctgcggatacacacagccggtttttgccgctaccatctggaccaaagccaatgagatcatgaaggatgtctataaccagattatcctcatttccaccattgctgcagtcgtaacggcatcggttgcccttctgatgatgaatttttccaaaagcggaaaaaccgtggacgaatcacgtgcatggctcaagcgtatcgtcattacctgggcgatcttaaacgggcttggctttatcatggcttacatcaccccgttctttgcaggcggaaaatggaacggatagacgaaaggagatgccactatgggaatacttgacggaatcgtggaatggattgccgaacaggtcatgaacattctggatctgatcaccacttcagtcctcggtgctctgggctgttccatggatacgtttcttcgctactttcctgctgccgagaccatgtatcaggtctttctggcactgggcatcgggctgatcctcttaaactgggtatggcagctctttaaaaattactttatgggagccggtatcgaagcggaagatcccattaagctgtccatccgttccttcctctttatctttctcaccttctatgcgaaagatattgtggatctgctcctgaagatttcaggaacaccgtacaactggattctgacggaagacctgccgcctttaaaatttgcggattttaactccgtagtcacagtcatcctgggagtctgtgcaaatggggcggtagccatcattgcactgattctggtactgattctggcgtggaactacatcaaactgctctttgaagcggcagaacgctatattcttctgggggtactggtctacacagccccggcagctttttccatgggtgccagccagtcaaccggaaatatcttcaaaagctggtgccggatgcttggcggccagttctttttgcttctgatgaatgcgtggtgcctgcggctgtttacttctatggtcggcaccttccttgccaatccgttatccctataagaaaggaggaccaaaatgaaacttagaaagaaactcataccattcctggtactaactgcctgtctggtactgttttgctccatgccggtctttgcagcggagcttacggaagcagacgtggaagcggcagttgccagtcagggaaaggaagcggtaaccggaaatgtcttcgtctggttcctgtgtgccattgcctttttaaaggtatcccagaaaattgattcttttctggcatcgcttggcatcaatgtcggcaataccggaggaaacatgatggctgaacttctgattgcaggacggagcctgaccggttccatgcgttcccatggtggtggcggctaccacaaagcctcttctcccggaagtgcggctgtcgcaggaagcttcctatccggcgggcttgccggggcagtgggaagacaggtacaaagagaagcggtcaattccgcaaccggttataccgaacacagcagtatcggaaacatgctctaccagtcatccctgaacaaaggcggagactttgccaatcaggtcatcagcaacattgcacagggaaattacggtcaggtaggttccatcaagggagcagacgcacagaaagcctttacttcctatatgggcatcaatccgggcggcggttcttcctatgataatgtagaaatcggtggcggaaggatcaccggtaccgaaaccggaagctccggaaaccgggattttgccctgtaccatgccgaccagtatgcagctcctactcagggctcctactctacggtacagtccgtggatggttccacctggtacaagcagtatgcacaggatacggtcgaaaaaacaccatatacttccggcagcggcaaagtagcctacaatgaatccattgtccagaaactgccgccagccccacagcgaaaggagcgtatgtaacatgccaaaaacagccttgatgggcagtcctcttgctgtcatcggtacagtattccggcacaggcgcacccttgcgaaaactggagcagccgtcggcggtgtactgatgcttcccattctgttccttgtcatgcttccgggactcgtcttcggagacctctctgaaaataccggagcactgaccagcaacacggtaatcagtgaaaatatccgggcttccaatcaggcaatcgtggaggtgcttcaggaaagccatgatgcactgcttgctaagatcaatgcggaaattgccagactcccggaaggagatactgcctctatcagcgatccttacgcttccagtatcatcgtaaatgcgaaccagctcatcgcacagttttgtgccagccaggatgactataaaaatataaatatcagcaaactcaaaagcctgatccgggaaaacgaggacgggcttttttcttatgacgttacttcagaaacggccacggtggaagttccggcggaagaggaaaatgcaccacccagaaaggttacttttacccgccatacctacacggtcagctatgccggagatgcctactttgcagatcacgtctttcatctgaccgataagcagaaaaaaacggcagacagttatgtggaaaacctgaccatgttctttggcggctccgcttccggtcttgccatggcggtaggtgtcagcgatgaggtgctggcttaccgggctaccatccagcaggtcgcacagaaatacggcatggaagcttatgtggaactcctcatggcagtcatgatgcaggaaagcggcgggcgtggaagcgatcccatgcaggcggcagaaggcggctttaataagaaatacccccatgtccccaacggcatcaccgatcctgcttattccatcgaatgtgggattcaggaattaaagtatgcactggataaagcaggatgtaccggacctaccgacctggaccgcatcaagctggcgcttcagggttacaattacggctccggctatatcgactgggcaatggaacgtgacggcggttataccaaagaaaacgccattgcttattcggatatgatgtgtgcccgtccgaactggcattatgaccggtatggggacaaggaatatgtggagcatgttctccggtattatcagattaccaataccggcggaagctatccggcaaacggaatgcagattccgcactatctccagaccgattacgggaacattccttatggcggcggctccatcgcatcttccggctgcgggcctaccagctttgccatgatcgccagctacctgaccgggaataccattacccctccggatgcggtggcatggtgcgggaattcctattacaagccgggagttggaacctactggagctactttcaggctgcagccagtcatttcggctgtggcagcgtcacacagaccagcaatgccaatacggtacttcaggcactctccgaaggctgtccggtcatctcctctcagcgggcaggacttttcaccagcggcggacacttcatcgtactccgaggtgttacggcaaacggcaaggtactggtcaatgatcccaatgacagtgacgcaaagaactatattaaccgtgaatttgatatgatgtcggaaatccatgctacggcaaatgcctactggatcttcgacaaaaaataaaggagccattatgaacagaacaaaagtgattctttccatttttctgatgctgtttctgctgcttgccggactggttctccccagtttctggaaaagccagaaaaaagaagcttccggaaacaaaggcagggaaccggcaaaggaaacaacagaaacaaattctgatacccccatgccggaatatctggattttgatgctttaaaagcatttttctccgacagccagattgcttctctcaaagggcagtttcctgtctacctaaaagagtatgtcaaaaaagaacagacaagcatcaccttcctgccggaaaaaaccagctaccctaccgaaacaaccgtctgcctgatgtttttactttccgatcaggatacgcttccggttacctatcacaccccgacgggtgtgtttttatttggagaagacggggtacaggtctctgcagatacgactgtttacgaaaagcaaaccgatgattccctgccgtccctgacttcgcaggacattgaacacctgcaggaaggcgggtatccggatacttctgacagcccggaagctccggacacagaatccggcagtgcctctgtgccttccgaagatgcgaaagatacgaaaaaggaggtgcagccatgacacagccagaagaaacaccggtttcctttatcccttccaacttcattgagaaaggcaagatcctaaacggaacttttgacatccgcaatgccatagaaagcattgttctttccctggcaatcggtatccctgttttccacctgccgctgtccctgactgcccgcatcatcattctctgcatgaccgcacttccagcggcaatggtagccctgattggaatcggcggggagagcatcactgcctttttgatgaatgccctgcgttttgtagtgaaccgcagggtaatctggaggtccgacagtcttccggaaggaaagccacgcaggaaaccacgtttcaaagagccaaagacaaagaaacaccggaaagcagaaaaaatggcagagccttccaaagtaatggcatcggctcccccacagtctgaaccggacgcaccagctccgccaaaaagtaaaaaaaaagaacaccggcagtttgatacctccaccaagcggggcatcaaaaaacaggcaaaggaagatatccgttatctgaagtgggagcagaaagaagccagccgacagaaaaaagaggcggcgaaacagataaaaatacagaaaaaaacggaagcccggagacgaaaggaggaagaaaaacgggcagtttccgaaaagcgggctgcaaaaaaagagcagaaaaaaaaggtggtttccaaggaggacacctcatctgccacgtcaaaacccgtttcccggaaaaagcgaaagaaagaccagaccttggaggattatcttccggtggaaaaaatcgcaaacggaatcgtctataccacagacggacggtacgtgaagatcctggagattgaaccaatcaactttctgcttcgaagtgccagggaacagcagggcattatctacagctttatcagttacttaaagatcagccctgtcaaactccagatcaagatgatctccaaaaaagcagacatcaataagcatctggagcagtcccagctggagctggagcgggaaaccgatccccactgtcaggaactgcagcgtgactacatccagtttgtccagaacttaagttccagagaagcagtatccagacggttctttctgatctttgaatatgaaccattcaacgcaaaccgaaaggaagaggaacgggaaatccttgctgctcttgagacagcctcccagaccgccaaaacctttctataccagtgcgggaatgaagtggtctcccatgacaatgaggatgaatttactacggatgttctctacacccttttaaaccgtaccctttgtacggaggttccgctttcgaaccggatcagcactgtactgtccgcctatacaaaggaaaatcgcatggaggaactggatcacatccggatcaacgagtttctcgcaccggaaagtgtggatttcaagcactcccattatgtgcagatcaatgggctttaccattcctacctgcttgtgccgtctgacggctacaaaaaccgggtaactcccggatggctgtcactccttgtcaatgccggggaagggattgatattgatttctttctccagaaacagccaaaggacaagattcagcagcgtctcggtcagcagatccgtatcaaccgttccaaattaaaggatgcgtccgataccaacactgattatgacgatctggattctgccatccgctccggatattttctgaagcagggacttgccaacaacgaagatttctattacatgaatcttctcatcaccattactgcttccacgttggaagaactgcagtggcggattcaggaaatgaaaaagctcctgatctcgcaggatatgaacttacactcctgctactttttacaggagcagggatttttatcctctctgccgctggcaaatctggacaagaagctttttaagctgtccaagcggaacgtactgacttccggggcggcaagctgctatcccttcgtcagctacagtatctgcgatgataacggaatcctctttggggtaaacaagcataacaattccctggtcattgcggatatctttgattccaggcagtacaagaacagcaacatctgtatcttaggctgttcgggagcaggaaagaccttcaccatgcagaccatggcactaaggatgcgaagaaaaggcatccaggtgttcatcatcgctccgctaaagggacacgaattttaccgggctgcaaggaatgtcggcggagaatttatccagatctctcctgccagtaagaactgtatcaacatcatggaaatccggaaggtagacaattctgtaaatgaactgctggacggaccgacactggatgcctccgcactggcaggcaagatccaaaggcttcacatcttcttcagtctgctgatcccggatatgtcccatgaggagaagcagcttctggatgaagccctaatcaaaacctatgccagaaaagggattacacataaaaatgaatccctgacagatccgcagcatccggagcagtacaaaaagatgcccattctggaggatgtctacaatgtcctgctggaaagcgaggataccaaacgtctggctcatatcctgaaccgcctggttcacggttctgcttcttcctttaaccagcagaccaatgtggacctgaccaataaatatacggtactggatatctccgaactgaccggttccagcgatcttttaacggtcggcatgttcgttgccctggattatgtctgggataaagcgaaggaaaaccgtaccgaagagaaagccatctttgtcgatgaggtctggcagctcatcggtgcatccagcaaccggcttgcagcggaattcgtactggagattgccaagatcatccgtgcttactccggagccggcatctttgccacacaggatttaaacgacttctttgctctggatgacgggaagtacggcaagggtatcatcaataactgcaagaccaagattatcctgaacatggaggatgaagaggcacagcgggtgaagactatcctgcatctatcggaaacagaagtaatgaacatcacccatttccagcggggcaacggtctgatctcaaccaacaacaataacatcactgtggaatttaaggcttccaatctggaaaaggagctgattaccacagatcggcaggagcttctggaaatccttgcgaaacagaagaaacaggctgtgtaacttttggcagcactgacgctgcccttttcatttgaacttcaagaaggaggagacttatgttacagacatacaaatcctataccagacggacgctggctatgctgctggcagtccttgtcgcagtcggcgcattgttttccggcagttttccggttcatgcagccgacggcaccatcagctataaggcaggtgccaatatcccttacggcagctattttacctcccgcatgagctttgacgggagcaatactgcctactgcgtggaaccactgaagaaaacaccttcctctggttcctattcctatgaccttttaagccagaactccccgctcagaaaagcgctctactacttaaacggcggttacggctacgataaagtcgtcaaggataaatatttcagtggctggagtgatgataacagctatgtcatcggacatctggttgtcgcttacatctatgccggtaattccgctgacaccggagctttccatggcgccccgcagtcctatattgataaagcactggaagtagccagtgccattcagggacttccgaacccgccggaaggcttccgggcattcatcgttccgggacagggcagccagaccattgccggaagctggtatcaggttccaaacggctggatcgaactgaaaaaatcttctgccaacggaagcgtatcggacgggaatccgaattacagcttaaagggtgctgtgtatgggatctatcagggtgagaagctcatccagaaactgaccactgatgaaaacgggtatgccagatccggcgaactggaggaaggcgattataccataaaagagctctctgcttccaaaggctacattgtagacaccaaagctcacaaagtcaccgtaaaagcagaacagacttctgctgcaaacgtaacagatattccgcagaataatcccatgaatctggtgcttgaaaagctggatgccgaaacaaagaaagcctccccacagggagcagcttcccttgcaaacgcagaatttacagtcaagttctataccgagcagtctgacagtgatcctgcggaagctggaaagaaaccggcacgtacctgggtattaaaaacagatgtttccggaaagatgcattttaccaaagattcctttgtaagcggcgatgccttttactataccagtgatggcaagaccgtctgtcttccgctcggtaccataacggtacaggaaagcaaagcccctgccggataccagctcaatccaactgtcttcgtacagaaaattacaggtgacggtaagcaggaaatggtttcggtataccagtcttctaccatagaagaatctgtcatccgtggcggagtgaagatccagaaacgtgacagcgagaccggagaagcaaaaccgcagggttctgccactttggaaggtactgtctttgcgatcactacgttaaatgaaaatccggtattagtagacggaacatcctacacgaaagatcaggttgtccttacacttactgccgataaatccggttctgctgcaactgcaaaagatgctctcccattcggacattaccgtgtggatgaaacaactgcaccttccggttatctgaacagcggaaagatctctgtagaatttgacatcacagaacagggaaaaatcgtggaactgactgcaaaagacaattccatctccaatcaggtcatccgcggggatctggaatttgtcaagattgctgacggcagccagaaccgtctggcaaatgtgccatttaagatcacttccaaaacaacaggcgaaagccatgtgattgtgacagatgccaacggttatgccagcacttcctccaaatggaacaaacataccgcaaataccaaccggggtgagtcttcggaagacggcatctggttcggcacctccaaaccggatgattccaaaggcgctctcatttacgatacttacactctggcggaacagcgttgtgattccaacaaaggcatggatcttttaacctttgaagtcaaggtttataaggattctgttctgatacaggttggaactctgaccgatgatgccattgagatcggcacgactgctctggatgccgagaccggtacacacatgagccagccggcaaaagaagtgaccattgaagacgttgtggaatacgaaggactgaaaaagggccagaaatacaaactgactggaaccttaatggataaaaaaaccggggaaccaatccttgtggatgaaaaaccggtgatttctgaaactgaatttactgcaaagaaatcctccggctccgtcaaagtaacctttacctttgatgcaacttccttaaagggaaaaacaaccgttgtcttcgaggaattatatcaggatgagatgcagcttgcagtccataccgacatcaacgatgaagaccagaccatctatttcccggaaatcaagactactgcgaaagatgcggacacgaactccaatatttcctgtgcaaaggaagaaatcacgctggtggatacggtttcctttaaggggctggttcctaaccagaaatatgaagtgactggaactctgatagataaagaaacaaagaaaccagtcgaagcagacggaaaaccggtgacagcaaaagcatccttcaagccaaaagaatccgctggtacggtagatgttacctttacctttgatgccagctccttaaaagggaaaacagtagttgtctttgaatccctggcttacaaagacaaggaagttgccgtacacacagacattgcggatgaaggacagactatttacttcccggaaatcaaaaccactgcaacagatgctgcttccggcacacactatgcaaaaccggaaaaagaactgacgcttacagaccttgtggaatacaaaaacctgatcccaggcaaagagtacaagctgacaggaacactcatggatgcggaaaccgaaaaacctttcgatgtggatggcaaagctgtgactgcagaaacaagtttcactccggaagaagctaacggcagcgtagagctttcctttacctttgatgcctctgcactttccggaaaaacgctcgtggcatttgaaacaatgacttttgaagatcacgaagtagcggtacatgcggacatcaaagatgccaaccagaccatctacttcccggaaatcaaaaccacagccaaagacggcagtgacggggatcaggatgtctctgcttccaaggaagcgactatcgtagatacggtcacttatcatggtctgatgcctggatctgagtacaaagtcatcggaaccctgatgaataaggaaaccggagaggctttgttaaaagacggaaaaccagttaccgctcaggcagaatttaaagcagaaaaagctggcggctctgtggaagttacctttaccttcgacgcttctgctcttgccggacaggatgtggttgtctttgaaaagctctactatacagacggaaaaaccgagcatgagattgcttcccatgaggatctgaaggatgaaggtcagaccgtacacatgacggagcttccgaaagaaccggagacgcctccggtagctccgcctgtaaagaccggcgatgagacgccgcttctcctgtatgccggaatcgccatagctgcacttgcaggtgcaagtgtcctgggcatcgtttacttcaaacgcaaaaagaaacatcagtaactcataacgaagactcctgcaggcagctcccacatggaactgcctgcttctttagtaggtgatgaatatgaaacacccccactgcaagacagatgccaagcacatccgtcattttctgaacctctgtgaagggaactggcactcctgtatctacgtctggtgccgcacttgtaacgcacaggaaagctgtgagaactctggctttttattccatccggatgaaacgggaagcccctgcatcctccctctttcagatgcagcgcttttgtttccccggataccggagccaaccgaatgtaccggaagcatgagcattgctgcttttacagagctttatctgccctatctggccgctcagaagctgcctttaaagccatgtcccattccggcactgctccggcttcaggagaaccagcaatatgactggtaacaaaaagttgcactttcaggctcttatacgtacaggatatgtaaagaaaggaggcactgcctatgttaaacgtaatttcaatcatccaatgtatcgatcaggtctttacgaacctgatatttattcccatgatttttgtcctgtatgtgaaattccgtccgaaaaagccatggaccagaaggcgcaggaacacttacctgctctgtctggtactgatcagcttattcctgctacggattttctgtgagaagttcatctttacaccggttaattatccacgtttcacagacagcggcttattcccgctcatccgagcaattttctatcccggcatctgaaaaatggggattcgtgccatttagtccgaatctgggatcagtatccgcttgcgtcctatgggaattcatcacctgcttacttacaatataagtatacagtacgtactggttattcacgtacacgttacgtatcgtgtatgtacaagcgaggtgaaaacagatgaagaaaccaaaaatcatccgctgcccttactgcggcggaacagcaatattaagagatgcatcctttgtatatggaacgcattctcatggcggacaggtttatgtctgctcccactatccatcctgcaattcctatgtcggggtacatccgggaaccaagataccaaaaggaacgctcgccaaccgggagcttcgtcaaaagcggattcaggcacatcgaattttcgatcagatctggcaacagggcatcctttccaaaccggaagcatatcgctgggtggcagataagttctgtctgacagataagcaggctcacatcggacagttcagcaactatatgtgcgaccagctcattcgggaatccgcagatgttttaaagaacaaccatattcccttccgcctccgggcagccagctgaaaggcggtgattgatgatgaccttaccactaaataaaaagcaaaaacaactggtggaaaaatccatggatctggttccgatcatgattcgttccatgacccgcaccgctgcctatgtaactgaggaagaacaacaggaattatgtcagattggatatctggctttgtgccggtcggctgtcggatttgaggaaggaagatcattccagccttatgccaaaactatcatccgtcatgccatctttgactactggcggaaaattgcccgtgaccgctccatgctctgttctctggacgaagcatcatctgaagatgaacatctccattatcgtgatttgttttcctacgaggatacacaaacaactcacccggaaaaggacacaaaccagaccttgcttcttgagcatttaacccagcttggcaccggacagtcctcaactattcagaagggaattgtagccctctatctgcaacagcagggatataccagctttgacttggcaaaacactaccaagtaccagccaatcgtgtacgggcatggcagagcaaagcacggaaactattacagcaggatgatgcactctatgcacttctgacttaaccttgaaggagggaacttttatgctgacactttatactgctgtcggaaccttaaaatttcaaaaaacgacaggcggaaaatccattcctcttgtaatcaacgatggacaagaatatggactatcggatgacgagctgctgctctggagctgtcttgccttccagattctgacgctccatgaactccaggatgcctataccctgcgccagatacagaaagaaggtccgaaaggcttatccttccaacactatctgaaccgactttccttacgcggtctggttgtaagcggaattggactgacaggggtggatgccttatatcgccttctcggcagtctgaccattattcccttgaaggatacctttcccatccggctctttggctgcgttcagctttatctggaaggaactattggtgcaaaagagtttggcagatatttaaagaagaaaccctcttcaccgatggaagataccattctgaagctggctgataaggtatccctcacgaccgctgagcttgtcacaagtatggagcaggaaaaagtaatccacaacgaatcggatattatggatgagttatacacagaaccggagacaacttaccaaacacttgtggatgatgtccagattcaccatacccagtatccagtgctgcaggctattgctaatttgtacctgaataaacaaatcacatttcatacatgttaaaggaaggaaccttatgccaaaaccatttttcacaaagctggttgccatcagtgcaatcggctttttctgtgtactttttgggtgcatcttcgggatcgccacccatgaccggctctttatcctcatgagcctcctcatcggaatctgcagcatcttgcgtgcactcagtttctaccacctgatccatacacatgcttatctgtcactggacgtaagctgcacgaaacgggaacagacactcttcgggaaaaaccagcaatattggtttgccagtgataacggaaaggaatacgccttctcactggaaaagaatatcaaactcctagagggacatcggtatcggctgtacttccggaaaccacagcagggaacagggcaatcgatgccatgtgccggagatattctcggatatgaagaactcaccgatcaactgccggaacttccggatacatccgtttagatagaaaatgagccgcccgtactgcatcacccctacagttctggcggctcattttattataaataacctctcttatttctatcaaacaatagtgtttgtatccgcttcaatgccatgagcatttacttgtgtgtgataaagaagcaatagaagtgtaaaaaattttgccgttcctatccgacacttggccattgtgtcggataggtcgggcggttattcgggcaagtcaatcttgccgacaaagctgtaataaatctcaatgtcctgcctgcgggtgccgttctcatcatagctgcactcatgcaccacaattttctcgatcatttcccgcaagagagtgggggtcagttcttcaaaggcaaggtgcttgcggacaatgcccataaatttctcggcgttgacggtagctgcctgtgacttgtccagttcggcttgcagggcggcggctctctttttcagctccgcttgctcggcttcgtagtcagccgacagttccatgaaacgctcatcgctgattttgccgtttacattgtcctcatacagccgcttgataatgcggctgatttcagaaatgccgattttgtgcgcttcttccggtgtggtttctcccaccgcaaaggattgtatcaagtgccgccctaaatgtgtgccgcgatctccggcagcttcccgcgtccatgcaaactcaatatcggcggtttccagcccgcagccgaaagaggacgcaagcagcttcccgtctgtcttttcgggatttaagatatagtctatcgcagcctttaaggttgatttaatagggtgcgtctttgtaaccgccatatctcgtccaccgcctttttaatgtcctctatatcctgcctgtaaaccgtccccgtcgcattggcgcgttttgcaatttggttgatgttccggctcaccgcttgcagttcccggatatatgcttttgtgtcgcttcggtcaacgacaagaatatacccgtctatcgccattttacggaagtatgccccatactgctttatgggaagctgcttcatcttctcgtcgatcagccgcttttcttcttccgtaacgtaaaacttcatctgtatatttctctttcggttttccatttccgcaccgcctttcggtataagggtttgggattatcccaacaagcattttccgcaaacgggtactcgtttgctgtgcttgctatctactccatacccccaccgaaaggcggtatttgttgcgcgttcctttgattttggacgcaaaaaaagattgcagccgccatgcgctgcaatctcccgatttctcatattgtgaggttaatcctctgctttttcgacttccgttatctcccttgctgttgcggttacaatccgtatgcctttatcgctcataccgtccagcagcgcgtcaagctgccgccgcccggtggatttctccgcattgctgttcgggaagaaaaattgatctaccgaaatatgataccgggttacaaggtcatagaatacctgtaaactcggctgttgtcccttgttctcgatattcgcaaggtagcgcggggaaatatataactcgtcgcttacctttttgcggctctcgccgtattcatttctcgcggcttttatagctgccccgaaagccttaaagtcgtacaatggtacgggtctttttgccattttcattcaccctgttacattttacagttcacctttctttttggatatgtccacacaattcatatcattaggttaaatacttcctgttgtgtattgacagtagactgattttctgataaaataaaatttatgtaaaaggaggcggcgtttatgttgcatagcatgcgtattagataagcattgaaaaaaaggattttcccattttcaacatgggcttttttgtcatgcttattttgcggatgctatacaaaaaactaacgacgtatagatatagtatagacatagtgcaagctatgccttagttttgttgtactgctctgtgcattataaatgcaggtcaatgctcatgttgaggattgacctgcatttttttgtgtaaaaaggacgagtgaaatataatgcttaaaaaatattggataaaatgtccgatttgtaacggaaagacgagagttcaagtatttcataatactgtattaaaagattttcctcttttctgccctaaatgcaaattgacgcatatcattgatgtagaaaaattagagattgtaatcaaaaatacagaaaaacaaacttttattatttagaagaaaggatataaaaatgaaacgtttacctaaatatacgcctgcggaagtacggaatgatccatacggatttacttacaaagaaatgtcggaagttattggcgagaatgaagcaaaagccttatatgaagaattatataagcaattaccacgcaaaaaaaatctatcaatgttggtaaaaaatatttgcaaaagcagtgatactgaaaagtatgtttacgaactgaaagacaacaaatacattgaaacggtttttatcaagcggcgagatggtggaactgtttgcgtgagcacacaagtcggttgtcctgttggttgtattttttgtgagtccgggcgaaatggctttgttcgtaatctaacatcgtcagaaatcgtacaacagattatattgttgcgtcgaaaagtaaaccgtatcgtttttatgggtatgggagagcctttattcaattatgacaacttgataaaagcaatccatattctccgagatagatatgggctcaactttccaaccgacggcattaccatatcaacagttggtccggtcgatcaattaaaaaaattgcgcgaggaacatcttaaaattcagttgacaatatctttacacgcagcaacacaatctgcaagaaatcgtattattcctcacatgcgcatatatgctattgaagatgttgttaagcaagccttatcctattctgaaaggcataatcgcaaaattgtctttgcgtatttgcttttaccgggtataaatgaccggccctcagatgtaagacaacttgcaaaatggtttcggggcaaaaaagttatgattaacgtgttacaatacaacccaacaagcaattcaagaattaaagcaccacagaaacgggaaatagttgcattcaaacatcaattagagcaagcaggacttgaagttactatgagagtttctcatggcagagagattaacgcggcttgtggacagttagctaacacatataataaattcaaaaaaaatgattaaaagtgccagacgcatagacgcagagccgataacgcattaggtcaaaaaacctatgtgttatcggcttttttatttaatattgcgcaaaagccgctgttccctattatagaatggattgcgggtagtgtattaaagtcgcccttttttaaggatacggcggtatcggggaggtatcgccgtgtccatttttatttactgtaacccgcctaatgctttgcggtcaaaaaaagctatgctccgcaagcgggatattccggctatgaatgtgaactgtcaatacatttagctactgcttacatttcctttgcgcccgtccgcgtcttgcggacgggcgcattttgcttttttcaacttttttctgaaaagcgcactcaagagccatctcccgaacgggtacggagcgaaaggggcagagaggacaagcccttaactcccgtcctctactccacgcgggaaggaggtgaactctatggagctatcttcttccgacaaggaaagaatacaacatcagtacgacgcattagcaaagaaaactttggtcggcgaagcgaaaagccaccgccgcactcttgcgaaacgcgcagcacgcgaagttactttttcggatttgagcgaaagcgaactcgcgcagcttttcacaacggacgaatacgaaagcgattatttccgttttcaagtgtccggctttgatgtactcgtcaaaaatgaactgcttgccgaagcccttaacgctttgcccgaaaggaaacgcgacattatccttttgtcctacttcttggatatgagcgacgcggaaattggcgaactgctgaatgttgtacgcacgacggttttccggcacaggaaatccgcgcttgcgaaaatcaaacagtatttggagggaaaagcagatgatgaataccgttaggaagtctgaaaatctgttgccgttccctgtcatttccgcagcggcaaacggcgacacaaccgccatgtgcgcgatcttgaagcactacgagggttacatagcgaaactttgtacccgcacgctgaaagacgacgcgggcaatacctattcctatgtggacgaggaaatgcgtaacaggctgcaagtgcgccttattacccgcacccttgcttttcatgtaggataatcttttagcccatgcggggagcgtgtcccctttccacgcttcccgttatgggctatttgtcgttccgcaaaagcatatccgctgttgatgtgcttttgcaggccgacaaagcctattgttctttgacaaagaaagcggcctttggtgcgcagcataacaggcaaacgggtacattccgtctgtaccgagccagtcggcgggtacgccatgacagcttttccccataggggaaaagccgagcgagaactaccgcgccgtaaaacaggtttagcagcttgtgggcgacgacatacaaggcggcacaatgatactcccgcgttgaacaccctcaaagtattgcgcggcgcacccataagcatgggccggggtgaaactcccgtgaggttgcagctaacaaccgcccgtttttgccttttgacgaatatagtttatccatacaggaaaaggaggtttttctaatggataaaaaacagacaattacaaccgaacgcaaaatagggaaaatcacctatcttgttcaagcgttgccgagtgaaaaggcaaccgatacaatccataaaaagattgagaaactcattgtaaaggatttgcagaaaaagcccggaaatccgggatttttagcgtccgagtagtgcattaggcggcgggatatggtataatgatagcaacacattatacctgtttattcggctgtcggaaaggaggactaatgttacagtcgaataaaatcaccgccctttactgccgtttaagtcaagaggatatgcaagccggagaaagcggaagcatacagcaccaaaaaatgatacttcaacgctatgcggacgaacaccattttttgaacacaaagttttttgtggacgacggattttccggcgtgagttttgagcgcgaggggctgcaagcgatgttgcaggaagtggaagccggacgagtggcgacggtcattaccaaagacctttcccgtcttggcagaaactatctgaaaacgggcgaactcatagagattgtatttcccgaaaacggagtacgctatatcgcgatcaacgacggagttgacacagcgcgggaggataacgagtttacccccttgcggaactggtttaacgagttttacgcccgcgacacaagcaagaaaatccgcgcagttaaacaggcacaggcgcaaaaaggcgagcgcgtcaacggggaatatccatacggctatatcccagacccgaacaaccgccaccaccttatacccgacccggaaaccgcgccgattgtcaaacaggttttcgctatgtttgttagcggcgtgcgtatgtgcgaaatccaaaaatggcttgcggaaaacaaagtcttgacgattggagcgttgcgctatcagcgtacaggacaggcgcggtatcagcgggcaatgatcgccccctatacttggccggacaaaacgctctatgacatattagcaaggcaggaatatttagggcataccataaccgcgaaaactcacaaggtatcctacaagtcgaaaaagacccggaagaacgaagaagaacaacgctatttcttcccaaacacccatgagccgcttgttgacgaggaaacctttgaacttgcgcaaaagcggattgctacccgccaccgcccgacaaaagcagcggagattgatattttttccggcttgctgttttgcgctggttgcagacataagatgtattaccaacagggcgtaaatatcgagccgcgcaagttttcctattcttgcggcgcatggcgcaacagggcaaggacaggcagcgagtgtacctctcattatatccgcaaaaacgtacttcttgatttagtgctggaagatatgcggcgggttttgcggtatgttaaggaacacgaacaggactttatctgtaaagctaccgagtacggcgacatggaagcgagaaaggcattagcgcagcagcaaaaggaacttttcaaagcacaggcgcgtatgaccgaacttgacacgcttttccgcaagctgtatgaggacaacgcattaggcagactgacagatgaacggtttgtgtttctaacttccggctatgaggacgaaaagaaatcccttgccgcaaggatagacgagttacaacagcagatcgcaaccgttaccgagcgaaaaagggatatatcaaggtttattcagattgtcgggaaatacagcgacatacaggaattgacctatgaaaacgtccatgagtttatcgaccgtattttgatacatgaattagaccgggaaaccaacacccggaaaatcgaaatccattatagctttgtcggacaggttgataccgagcaggagccgacgcaagttgtcaaccatgaccgccgcaacatggtagatgtaaaaagtatcgctatctaaccccagcaaagttcgcgccggaaaaaccgtcgtcggtgtaccagcgcagattggtaaagccgttctgttttgcgtaggtttcgagtatccttttttggttcgatatggaattactctcgccttgcaattcatcctcgtgggacaatctcggataaagggcggtaatgaggttttgggtggcttgtcttaacataaaatcctccgtttccgacagccagccccactattccgtggtttcattgtaccacggaacggcgggggctgtacagcggcaaaagcgttaaatttgcttctttacagcttttcaattttccgatttttatggtatgggttgtcgtcccatatttgcagtagaaaagttcataactccgtggtatactctgatttaacaaaaaaatcagaagttaaaggagaaaacatgaagtatacaatagatgaattaaccgcggccaaaaggcaaattgattcaactctgcacaagctaagagaaacagtaaaaacatttgaatcaaaggataattccgagcgttataaatcacaaatcacattggcaaagagaagaataaaagcctttgaaattgcaaattattttatagagaatgagattaagaattgctaaagcacttccgattttcgttccagcggtcatgctccctggcatggccgcttttccatgccccggttcacgccggataagtcggctcctgtgtagcagcggcttccgcttccagtacccgcgccattttgtcggcggctgtggttgtggtgtctttcttgaaatagccggacacgacaaggacggaattgcccatgcggatttccgtcacacagtcagggcggcgggtggtgcgggtgtcgtgctgcttgttatctgccataggcaatactcctttcagtcggtaatcagtttcttcatgctctccattttccgcttggcggtttcctgccggaagttgtcgccggtaaagcgtaccgggacgcacatggaaagcaggcggtcataaatccgggaatgggcggtgtcctccgggttgtgcaggtcgtccagcgtaaggttggtcgtgacgatcagcggcttgccgctgcggtaacggctgtcaatcacattgaacacctgttccagcccgtattccgtcccgcgttccatgccgaagtcgtcaaggatcagcagcggataacgacaaaggcgggaaatgtactcgttgcgcccctcaaagctggcggcaaggtcattgaggataagagcaaagttcgtcatgcggacggggatttctttctccatgagggcgtttgcgatacagcctgcaaggtagcttttgccggtgcctacgccgccccagaacaggcagccgatattgtctgtccgcatatcttcccaatgctccacataccggcgggcaagcccggtctgcgggttcctgccgttgtcgttctcgaaagtccagtcccgcatggtggggtcggtaaagccccggcgtttcagttcttccacggtgtcaaggtgtctgcgccgcttttcggcggcttcccgttcctcgcgggcggttctctggcagtcgcactctgccgggtggcggtcgcgcccgaagatagcggccttatccggcgcaaaataggcttctttcggcttgcggcacttgccgcagtacagtaaaccgtcctcgccggtgtagtcctccggctccgggatggtggtcgtcatattctccaaaaccgcgttgatttcattcttcataaactctcgccctccttgcatgagtagtctggtatgccctttttaggggcttcctttttgtcgttccccgcccatatccgcagggcggcggcatagttctggtagcttttcccgttggcggcaaggtagcggctcatttcctcgatgaaccgttccagcctgtcagggtactctgcctgcaactcgtcgtattcggtctgtgacagaaaaatatttccatatcggccatagggcgcggacggccccccactcactccctttgtttggctctctgtaaggttgtttatagtagtttggttaggggacggttttccgaccatcataaggtcggttttctgaccatcagtaggacggttttccggctctatgaggggcggacttccggccatcagttggtctgaaaactgtacctgtggcactggcggtactttgacataaagccggttcggtgcggagaagccgccccgttcccgttccaacagccccgccgtgtccagttcattaagcgcccccttgatggtggtgctgcctttatccagtatttctgctatctccgcgatgggatagataatataaatcctgccctcgtcgtccagccacttgtttttctgggagagggtggaacggtctaacagcagcgaatacagcagcttggcggtctgtgaaatctccattttcagcaggaaacggggatacggcagataggcgggcagccgcgtgtctgccctgatataatcagcgataggatcacctccctgtgttcgggttgattttggcgtattgtcacgcattaaaacgccgtttccgggggaaaaggataaatgtatcgcgtaccctttgacacccacgaaaaaagccttgatttatgcgggtttgaaaggctctaaagcgtgacatctctgcctttgtttccgctttctctcggcggctttgattttcttcatgcgcccggcgcagtcggggcagtattttccccggttggatttggggacaaaggccgccccgcagacggcacaccgtttccggcttccccggcacaagagggctgcggccagctccccgtcaaggggcaggacagccacacggaaccagtggcacatgagggaaaaggaaatgctctggacgcacacgcaaggctccccgtcgtccaatagcaggcagttcccctcatcgtagttacagcactcatgtaccagccgccgcgcccgccggtgctggcggtagtccatgtggggcaggttatcgctcatggctctgctcctttctgcggtgcggctcgtcccggcgcaaaatctggtcgatgttccgcttgacggtctgcaactccttgaaccgctgtttctgttcgtgataggtgttatacaggccgtctttctcggagataagctgctcgatctcggcctgcaacgctttccgggcgggcagcttggtaatgccatgcgccttgaaataccgggctgctgcgtcggctatgataaaatcgctctcatgggcctgccggtatgcggcgcgggctttctcggatttctgtgcccgcagcccgtcgcgggcggccttggtctgggcgtaggccaacacctgccgctgcaacttctttttcccttgcagcttcgtttccagtgctttcagttcgccgctggtctggcgcattttctgataggcggtgtcaacggcggcttctaactgctccggggaagtaaagccgtattgctggtagacggacagcgttttggcggcctgcttcagattgtgtatcttcgcccagcgttcatagccccggcctttgccctcggccattttctgctcaatgtccacaagccgctgcactccgtcctgtttcggggcggctatctcggctctggcaacctgcaagcggtcttttatggtgcgtgggggatcgggggatctggctggcgcttcggctgctctggcggcgttttgctctaaaacggcaaagacagcggcgcggtcaaaatcgtcgcccagcttccgggcggtaattggctttgtcctgtccggcgtgaggtaggaaagccgcccccggctctccttgacggtcacaccctcctgcagcaacagagaggaaaactcgtcaaagctggcggcggtggcaagggctttccgtagggtctgccgcagcttctccttgttcgtttcaaacttggtctgccggggcgtgatactatcggcaatcatgggggcgttctgcttgtccagcgcggcctgtccctttttctgcgcccaatactcccggtcggtgacgcggttcttgctgccgttcaagaggtcgatttgataaagcccctcccggtggcacatctccatgacttcggatttgaagtagcgcagggcagcgtcggtacatcggtgcttgcagccgactttcgtatcggccggcctgtccatgtagggcaggaacggcacttcctcaatccgcaggctgtttatgacgatatgcacatgaatgttgccgctgtggttatgcccgtccgggtgggtgcagacaagggcctggtggccgggaaaatgctctttacagaattgttcccccaacgcctgcgcccggtctacggtcaggccgttgtccggcccgtcccgcgggtcaaagctgatgatgtagtggtggcttttcacatcttcccgccgctggtttttctgatagcggagattggcccgcatacacgcaacggcaaaatcctccccgtcgcagttcagcgtggacagccggtagtcctcgcgggggataagcctgccggtttcatcaaggacgggcttcatggtaaactcgtcatgctcaaagagaagatattgctcggcggctccgtagtcggcgtttttagagttgatatgcttgagtgttgccaaccgcgtcacctactttcttgaggacttcatacttgaggacggcaaggtcggatatggcggcgcgtacctcgccggaaagggtgttgtagggtacgccgtattcgttcagataccgggcaatctgattgaggttgccgccgatcctgccgtactcggctgtcagcttcccgacagcggaaagcaactcgtcattgaccgacgacacatggacaaccgggcgtatggtcgcccgccgtatcgcctgccggagaaattcggactggctgataccatagggcgcaagccgcgctgtgaagtcggcatactcatcttcggacagccgggttttcacaacgcggctgcggtggggcgtgttgtatttctttcgcatggtgtgacctcctttctcgcccgtaagggcgcatgagcagggtttggggaaggcactccccaacaagtttccccgcgaggggcaaaactgcagaattgcggattttggcaccgtggtagaaacttgctctccgtgactgcaaactttctctcacttccgtccgccacttttttggaaaactgcaaccacaaaagtttgtttctctttttctgctactactaatcctgtaaagggcattcctgcccgctttcgctaaaatgacaccggacgcagtggtttctacccggtgttggagaaatcctttctctttgccctctactacgggtaaatgctccaaatgccaaacaccagggcagaaaaattccctcctcgcttactactacaaccggcagggggcaaaatggccgggagcggagccggacaacaaaaaaagcagtaaatctttttcaagacttactgctttcgctggccgcgtcggtggcggctggtattcagtttttatgacttgtccggtggttcgtcaagccggaacttgaattgacagtcaattaaccgctgctttacatagtcctccacctcggcgttgacctgcccgttcacttttgagaaatagcggatatatccggcgtagtggagcaggacagcgttcacggcttctgggtcgccctcacgggctttgaggattgtttcataggggagaagtctactcataccggctcacccccatttcttcgcgtagccgctgcaaggcaagctggatatgccgccccgctgtgctgcgtgaccggccaatacacgcgccgatcacgcgctgcggctggcgcagaaagtaatagcgcaggatttcttcccgcgtctgctccggcaaaacagagatcgcgtcggcaagggcggcgttgcagagcaggacggtctgaccgcagacggtaaatgggtattcctcgtccggctccgacgcggcaaactggacaaacttctcgttcatcagatagtcaagggaaacttgccgttcccattgccgtttaagcttcaaaatcttgtccaaggcggcacagcggataacagtcttgcaaaaggcgttgtacctgcgctggatatattcttgataggctatctggtcggtcatggaaattcccctttctgaataatagtgcggggcggtggcacttcttgctgtcgccccttgattgcctaccagcaaaggcgggcggggctgtcaacggctgcgcatatgcgccgttcatcttgaccgttgactggctcggctgggtttgctatttacccgacaaacttgaatttattttaagctatcacgttttaccttcttaagccttactatcattaccataggaatttctttgttggttttaaaacattcttcataaaatccatcaatgacaaatccagctctaaaacaaaggttaaaaatatcttgtatggaacgatgataataaatctgctctttcggttgcccttcaatcgctatatcatagtaactgtgcggtgtcatatatttttcagtcaacgtgacaaaacaagggtgttgcgttgcaaagacaaaaattccgctttcctgcaacagttcataaacagccataagaagtggttcaatatccgtaatatccataattgccatattagaaactgctttcgtaaaggctcgatttctttttaattctaatatactttttctatcggtcgcatccgccacacaaaattcaatttgttttgcatattgtgattgccgtcttttagccaattctatcatttttttgctgtaatcaaaagcgacaaccgaagcgcctctttgtgcaagatacgaagaataatttccattgccacacgcaatatccaaaatgtaatccgcaggattaggagatagaagttccgttactttgggacgcactacctctctgtgaaattcattagattcgtcacccattgcattatcccaaaattgtgcgttctcctcccagatttttttactttcctctgttcccatgttctctcccactccccaaatttgcttttttgcttccattaaatcttccttactatattccattgttaccctccataacttctgattgttgccgtcttgacgattatgtatctttacattaccttctgaaacatatggcgcaccttgtccaggcggctgtttggacggcggggctggatgaccggctgaccgacagcggcctgatatcctttcagctctgtaaggcatacgctccgcccgttggtgtaaaaggccagatcagtacggtatgcctgtatacagcgggcgggaatctcgccagtaaagacaacttcatccttttttacctgggccgtttcgatggtggcacagtatttcggtgcatcatgataagccctggaaaggtattcctggggcgcatagaggatgaaggagagataaggttccagcagctgcgtccccgattccttcaatgcctgttccaatacaatcggggccaatgagcggaagtccgccggcgtgctgaccggactgtaataaagcccgtattcaaagcaaatcttacagtccgttacgttccagccgaacaagccctgctccagcccgtaacggataccatccctgacagcgttttgaaaactctggttcaagtatcccagcgaaacccggctctcgtattgtacaccggagccaagcgagagtggtgtaacagacagtcctatggatgcccaaaacgggttgggcggcacctcgatatggatggtgtggctggctgctttgagcggccgctccatataaatgacggagggttcctttaccactgtttcaagcttgtatttttccgacagcaaagcggaaacaacctccaactgcacccggcccaaaaaagaaagaatgatctcatgggtgatggaatccacttcgcaacgcaaaagcgggtcagtatccgcaagttgcgtaagagcgtccagcagccgttctctttgcgctgccgttttcggcgcaatcgtcgtccgcagcatggggagggggtcctcgcgccaccttttacgagggagccgggtttggtcccctaatacatcgtttaacctcacgctgtcgctgggaaggataacaatttcaccctgataagcggtgtctgtccgaacaatttcccctttggatggaatacgcatctctgtgattttcagcttttctctcccggccagggccaccgtatcccgcaggcgcagcgttccgctgtataaccgtagatagacacgccgctggccgcaatcggtgtactcaaccttgaaaacgctgccgcatagggcggcgcccccctgttccccaatcggttggaacagccctgtcaccgcatccatcaacggttgaatgccaaggccatttttggcgctgccatgatagactgggaacagggaggcgtcttgaacccgctgctgttcctcccgcgcaagtttttcccggctgattggttctcctgcgatatacttttccaataattcatcgttattttcgatgaccgcatcccatgcttctatgtcggtattttcctccaggactatttccggggacagcgacaccgtctgcttgatgataatatcggcggagagcttatcccgaacagactgaaccacgctctgcaaatcaacgccagcctggtcgatcttgttgataaagataacggtgggaatgttcattttccgcagggcatggaacagaatacgggtctgggcctgcacgccatctttagcggagatcaccaagatggccccatctaaaacagccaaagagcggtacacctccgccaaaaaatccatgtggccgggcgtatccacaatgttaactttacatctgtgccactggaaggaagtgactgccgcttgaatggtaatcccacgctgccgctccaaaaacatggtgtccgtcctcgttgtccctttttcgacgctccccggttctgaaatggctccgctggcatatagcaggctctccgtcaaggtcgtctttccagcgtctacatgggcaagaattccaatattgattattttcatgtgattgtcctccctttacagccccaaagggcataaaaatccccagcagtaaaatacttttaccactggggattataagttgcggacatacacatatacagcatacacctgtttgtgattgctgtttttggggatatgtcaaaattgataaggcaaaagtattcttaaattgggtacaaaaaactaagcccctacaaaaggagctatcataatcctttgttcccactatttgattatagttttatttaagaataccttgccgcatattttttactccttttctggattaaatcattgtatcacatcagttttaggaaagcaagtacctaaaagaaatttttcttccccttatatgtaacaatcataccggcttcctagcgttcagaatgttttctgctgtctgctgtggtgtttggttggaattgtccaaccaaaagccgatccgtggtgttgtctgcattttactaaatacaaattcaatgtatacagaaagatataaggagtgggagggattccgccgtagttggcattgtaggaaaatccaaaagtttagattttcccacaatgcttatcttttggtctttggttcggaatagtgtagtgctggcggtctatctcttgttttcggttgcttgcttccttaccgtacatgagcatttgctccgggaatgtcttagttaaacttgaaagaattagattttcattctcattacacaaatattattagataaccaattcagaaatatcaatgctcgttttatagttttgttttactccgccaggagaagtaataaaaatcgtagcatattccccattttcataaagggtaatttcttttatatctttttcttcatcttggttcgtagtatcgcaataaaattttatggtatatttagggttcatacctatgcttttttctgtctctttccatgattttatatttaaagcagaaataaccttgtctatattatgcttatcatcatactttaccagcaattccttatttgcggcatcatatatctctataacttttacaccttttacataattgtccattctctgcctttttccgccccgccagatacctgtgccggtatttcagctctgcatactctgtgatccgtttcatgtagactgcatcataagctccgcctacaacaccaaccaccggaattccctgtaagaacttcatatacagaagctcttttgacaaagcgcccgccgtttgttcgatctgctccttatcctgatactcttccggcagtattccgtttctgataaattcatttactttcccgtcaatctcacaaagtgtatccccataggatactgctccccggatcaataataagataaaatatttttcttccctgctttcatagctgtatccatactgcagagcagtctcataaatattctttaaaatcatccctgtaaataccggaatatccggcagaccgattcccaatacgcccatcccgattccagacacaccggatagcagtaaattctttgttcccgtatctcttgcctttttagaaaaagagcggagggatttggaattctgctttacatccgccatatactgccgcacctgataatcctgctccagttttgtccgctgatacgtcttttcaataaccccggttcctttctcgaaaatcagagcaaatgccttcgcaaaagcggtatccaatgttttctgaagtttcggcggtatcttttcctccagtttctgattcagaatgctctcccttttctctgaacgcttctgaaggaatctctgctcctgtacttccagcctttcccactccttctgaagcggtgtccttttatcaaataatcgcatcttaatacacctccgcaccaaacggcatcaatgccagtttcgccagtttaaactgctgtaaaccaaacgggattccgataatcgtcacacataaagctgtacccaacgccagatgctccagtgcaagaggcagaccggatacaatcagccagatgatattcaaaaggaacgaaccagctccgccaccatactgcacctcttttccaaaggggaaaaaactaagcgccgcaaatttaaaacactgcatccccaccggaatccccacaacggtaatacaccagagacaacctgccagacaccagctcagcccactgactgcgccgccaaacacaaaccacaacacatttcccaggcatcccatatgctacacctccccattcatccgatttttcacatcagcaagtatcttttctatccggttgatggcatcatccacctgttctcttgcatctgcaatcttgctctgcaccatataatctgccaccagcccgtccagaaagaaatccgcaaaggaaaggaagctgccgatttccatgcgcagatccaaggaaacctgcacatctcttaattctctctgaaaacgctgaatatcgcttttcgcctgttccatcaacgcagctgcgtcattcattttagaatgcttcacaaagtcactgataaagcctcctccaagcatatcaaaaatgccccagtttctcgcacttcccaacttatcccttgctgcgtaaaggctctgaagcgcccgctcccctgcctgtactgcttcctgcatttcccgtttcatcatttcgttactcatcgtttatcctctctttctttttagcagactattgcggcagattttctatatttcataataaaaaaagactcctatcatgacctctgccacaataaaagtcttgctatctcatttgctacgggtatctctcgataccggttgtcggttacaaaaccacctctttcaaggcgttcagctactcccttttttgcttgagatgaatataacatattggaaataatttgtcaaatcatgcatttttcttttccaaccgttccgcttctctggcaaatacatgcgagatatcaaacagttccggtacatctgatatggtacacacattcacacaataattgagccatggaaattcttttgtcatctgataaataactgccatggcttttgcttctgacattgcttccaccgaatgatatcccgatccctgaatatgctcaaatccgtttgcttcaaaaaagtcccttacatccgcatatgcattatgccagtcacctttcggataatattcctttagtgcttgtgtattcaggtcaaaattgatgcctttcctctgtaagctgtccatctgttagttccttataaagtctgtaatcaggttctccttttctgttccgttataccagaaacactctaacaaattctctgcaattcctacggagtttttcaactgaaagattgctgcccagaatcttccatagtcctgcttgcgtccccggtcaagataaatcctgcttccaagggctttgactgcacagcttaaatcctcctgctcaaaaatctgatctgcctgttcacacatctgatttaccgtttccggagcgagcttgcttgtatcaaatttaagttctactttatacattatactcatcctttcatacaacaaatgactgagtgactcttctctttctactgtaattctaccatgaaacctatataaagtcattccccattttcacttgctttaatataaatttttccttttattttggaaacacaatctccacacagaactcattcccttctatccgggcgctgattttcccatccatacgaagtaccagctctttcgcaattgataagccgagaccgctggaagtcttactgcgtgcttcatccgctttataaaaccgttcaaacacctgatctacatttattttttccacatgacatacttgattttttatctgtatccggatgttgttttcaacttcttccagtgaaatactgattttcttctccccgtgatccagtccgttttttatgatattctgaaaaattctctggattccctgttcatttccgttcataaacagcagtttatctgtaatctgtatctccggttcaattcctctgcccgtccattcatcgtagtaggaaaatatggtatctttcaaaatcttgttgatacagcaggatgacatttccagatgaaaagaatcgtttttaagttttgtaaaagtaaataattcttccagcatttctttcaggctgccgattctctcctgtatgatcttcatataccgtctctgctctttctggtcttcacaggtttccattaactgaaaatatccgtcaagggatgtcaaaggagtacggatatcatgtgagagatttgtatatgtatccgaaatcatctcctctttcttcaagtattccttcttttcccttcgcttcagttccagccattcgtttaaaacatctgccaactcaccaatgcctccaaaatccatttctctggtaatcagcatgttgctgtcgtgcttcatcagaaacgacaactggcggcagatgtctttcacctgccgctggtatttccaaaataacattccttgtaccagtatcactgctatcaatagcacgaaccctagttttatcatttagatatctctctttctgaatacccatgctgtcagtaatgtaaccacgattccgaacgccgccgcaatcacaactgccgtcaggcattccttattggtcggtgacatggataaaagtgcaatctttcctgtcactgtatatttcaaaatctggaaattctccacacctgccttctggatcaaatgattgatcactccgtataagacaatcatggtattcatgcacaggcagataacaatcgtcatgctgaacacgttgctgttcaaaaccaccgcaatcgccatactgattagtaccagtgcataatgaagcaaaatctgaataccaaagtatctcagcaactcgcttccattcccccactccagatatccgaagtacatctgctgtgcaataatctgaatgatgaaataaagcagcatggtaacagtcgtatacacaaacaacacggaagctttggaaaagatcaggtttctccggctccttacctgcccgccgatatttttaatataaccgcttcctatatctgcactggaaaacagcactgtaaaaatcaccagaaacaacgccacaaacttcgcctgcaggtttgcatatacctgatcaaagaccgttactttttctcccggctgtgtcggcaggaatacggacattcccatattgatggtttctggtttcactgtttctgcaatgctttctgtctgctgttgttccgcttccttgttcatcgtatcaatatccagtttcgacatggatgtggagaagaatatagctgccgccatcacaatccataccacatacatactttttgtccggaccatccggtacagatccatttttatcatattaagcattttgattccctcctgtcagattcaagaaataggtttccagttcttcactggtaatggaaattccattgaccaaaattcctgcttttgccagttccatattgacattggcgctttcattcaatcgttcaaatatatggatatggctcttatctgtaacctgatagttggtaaatcccattctgtccagaatcgggactgcctgctccggatggattaactctatttcaatccgttcactgcagcgtttcatcagttcttcgcttgtcagctcctgcagaagacttccattatggataattccataatccgttgcaatcttagataattcctctaaaatatgactggatatcaaaatcgtcatattccgttcatctcgcagtctctgtatggtatcacgcacctctgcaattccctggggatcaagcccattgatcggttcatcaaggaccaggagatccggctccccgaccagtgccagcccgattccgagacgctgcttcattccaagggaaaaatgtttcgtttttttctttccgacaccttccagtccgaccgtctctaagatatcttcgatgtatccctttttccgaataccaaacaattcacattttattttcaggtttgtatatgcattcatgttgccatacagccccggtgcttcaatcagacaccccacacgagaacgaatcctctccagttcttttcctttacacccgaacatctcaatctctccggctgtcggtcttgcaagtccactgatcatcttcaggcaagtcgtctttcccgcaccgttccgtccgataaatccatagatagcacccttttttatgtgaaggtttactttatccactgccttatgatgaccatactgcttcgtcaatccatttgtacttaataacaattcactcaatgctttcatctccttttcttatctgctgttatcatatcggataaatcctaatcaaacgcaaataaatagtaaaaaaagagtaaagattaagaatgcagacggtagccgattccccatacggtatcaatatattcctcctgcgttactgcttttatctttttccggatattgctgatatgtacatccagtgtctttgtctctcccatatagtgttcatcccacgcatattcaaaaatctcttctttgctgaagacctgtttcggatgctccagtaaaagctccagaattgcaaattcctgctttgtaattttgggaagcagcactccggcaatccggacttcaaagcgctcacggtccagttccaggtttttatatgacacgcttttatgttccggctcctgctgcatatggcggagctgaacctgaatccgggcaagcacctcctgtatctcaaacggttttgtaatgtaatcatctgccccactggtaagaagcccgattttttcatccaatccgtctttggctgtcaggacaataaccggcgtattgccctgtttccgaatctgggcaagcacctcttctcctgaaattcccggaagcatcagatccaatagaatcaaagaaaagcccgccttatccatctggaacagcatcctcgcttccgtcccggaaaaagcctgtaccgtctcataccctgctttctgtaatgccgtatataaaagattattgatatccgtatcgtcttctacaatcagaattctgtttttctgctccatttttctcatccttccattttccgatttaaacaatattatattgcacttttataactatgtccaaaattcttttgatattatccttccacctcgtctacatatgctatatatagttctaattcttttgacatatgctatatcttgtgttaatataatcttgtatttaagtttttgtgctgtcccgtcatgggagtctggaccattcatccagaagcatatgcagtttaagtttggaaaatcgtgtcattatactgccgttttatacggtgctataatggcactttttttattttaatctattttaacgcccaaagaggcagaaaggagaatttttatgtcagcaattttaacaattttagggagggccacaagagatcctgagatgcagcaaggaaaaaattccggtacggaatatgtttctctggacattgcagtttcacagcgaggccaggatggaaaggaagaaaccatttactatcagtgctattttaacaagttccttgcagaacgcttagcaaaagcaggcgtaaagaaaggaaccgggctgatgatctatggtgatctggagcttcatccgttcatttatcagaaaggaaagaatgcggggcaggcaaatgccggtccgaggatcaatgtcaaggactggcactttgtaccatccaaccgttctgacagcaataccggacatccgggtgcaaaccagaacagccagccgaatggtggtgcggcaacgcccggtgcagccggcaatggcagctacccaatgcagggaaatcccaatggcagctaccagaatcaggcaatgcctggcggctatccacagcagggaatggctcctgctaacggtgcctacacgcctcctgcaaatggcggacagtatcaggccccgccaaacggaaccggtcagccacagagcagctacccgccgcagggcagttataccggaatgccaaattacggaggtatgccgggcagtcagccaactgacggctttcaaaatgtgccggaacagatggcatcccagttgccctattaactctcaaggaaccctatgttgaggaattgcatttatcatctttgtgatgatgcagttcctctttttcatgtccggaagcggcgatttcccatccagcttccgggcttgtctaagaatcatgaatcagaaaggaatcagctcatgaaaaaatcaaatcgaaaaaaattcttacagtttgtcgtgcttgtactgtttcttgcagcacttttcgtaccacaggatgccaaccggcttctgattgcaggcattgccctgatcggtatcggagtcacgctgttcagttatcttctcccgcttttcacggaacgcctgaaaaacagggagcataagctacgaaaacgcccagaaagaactcgtcatctggaaggaacacctgatctggaaaccattctctggagacagatcaaattccagattaccggaaagctcaaggaagccttcccggatgccacatgggattttgtgaaagaaccaccgctctcccagatactggatggggaaccattacggattcgcacacggaataccggaagttataattttgcggaaattctcatggatgcccgtggcagtctgacgcttcagatgatgaccattgaatccttacataaaaaggaaccgtcagaaggaaatccggattccagaccagccgttaatcccaaatcatggtattccctgattgggaaaccgctactgatggaattggtcggtgacttacaggcaaggggctatgaaaagctgtttatcaacgagcagggagatgtctatattctgaacggcactgaaccggaagtccggggaaagctggaacatttcccgcccaaagattactggggcgaattgacggagatttttactgaagatgaattgaccacagaagagaccgagcaggcactggaactgtcctggatctcataagaaggaggaacgaatcatggcaaataacatcgtagcaacctgggggttcaaacgcaaactcccggaaccatttgaggattatacggaccatgcaatctttgatgacattgcatccaaatactgtactcagccacggaaaaaatccacgcttcatgcagctaccctgcgggcagtccttgcttatctggagctggaaaacccggttggcagtaccccgccggaaaagcttggggcggtcggtacccaatccaacaattttgttgtggcggaatatccgagcaaaaccggtgatcttcaggtggttgtctacaaccagctaaacggaaagttttacggaggctgctatactcctccgccggatgtggaaagcacaccggaaaaatacgaatttaaagactccaaacagtccggtgcggctctgctgttcgcactgatgccggtttttctggcagatgaagagtgtaatgaaaagtatcaggaattaaaagcgcaccgggacaacggttatcccgatctggacgccgctgcggaaacagcagccgttctctgcgacaacatttaccggagaacccgctatgcatcaggtctcccgaccggtggtgttaagattgaccttccggcaaacggcgtattgtcgctgatcaaaccgttaaatatccagaagggggtctatgcaccaaccgaagtgctccatggagactttcaggtgttacgtccaggaagtggatttaagaaagcacaggcagccatttccagagatgattttgttgggaaatttatcctgaccgcatcccgaaggctgtctccggaagaggaggtatctgttccgacattggcagagtggtacatcatccctccggaaatcaaacggatctgcgaacacgcaaaactgacaacggataccacacagccgatgcggaattttcttttacggggaccggcaggtaccggaaagaccgaaggagccaaagccattgcttccgcacttcaccttccttaccgctgcattacctgttccgcaaatacagaggtattcgaccttttaggtcagattcttccggatgtggacggaaaacgcacccggcttcagcggcagtacccgtcttttcaggaaatccagttagatccctccggtgcctatcagaagctgaccggaaactatgatgaagaaatttctgccgaggacacctaccagaagctgatcgatacgatttttgatgaaatgcacagctattataaggaacacacctccggacagaacttccagtatgtggatacgcctctagtcgaagccatccgctatgggtatattcttgagatacaggagcctacggtcattgctaatcccggtgtactggttggacttaactcccttttagaccgctgtaacagcgtatatcttccaaacggagaaaccatccaccgtcatccggatacgaccatcgtaatcaccacaaacaatgactatgcaggctgtaaacagatgaaccagtctgtcatttcccgaatgaaccttgtgattgatctggatgaaccggatgaggatacacaggtagaacgtgccatggctgttaccggatgcaaggatgcaaaaacggtacgtctgatgacacgcattgtcaaatccatggctgtctactgccgggaaaatctcattacagatggctgctgtggcatgagggagctgatttcctgggtgcagtcctacatggtctgcggggatatccgggaagcggcccgttacacggtgcttgcctctgcctctgccgatgctgagaaccgtacggaagtggaagaaagctgtctggatactgtgcttgctgcgtaggacacgcctatgagaaaagcagcactcacagaagcccagatccgaaagcatctggcagataatctgtcttatctccggcaagccaaaacaccgaagttatcacaaaaggcagttgccagaatcttaaatcttcccccgaaaaccattatgaattatgaaaatgcaaactcctccccgatggcttatgccgtccttcgccttgctgtgtattacggctgcacgatggaggaactgctgacaaaaaatctaagaaaagaaaggaagaatatcacgtgaatcacagccaaagaaatttaaagaaactaatccgggcaaaagaggattccattgcggatgaggagttattcctctccgctgcctatcagaagtaccagacctcccttgccagagccgttaccggacgttaccggtatggactgcaggtactgctggactgggacatttccgaacaggcaggcgttgcatataccgacaattataaggtacatctcaacgcagcgaacccgatcacccagtctttccccacccgtttcttacgttcccagagcctgacagggctcaccgggcatgaagtggggcacttactctattctgatttcacagcccacgctgttcatctgaggagtctggaaaacggttccttctatccgaaggagccggagctatcccttccagcttatcagacagcactggaggagatcaaagaagtgttagaagaaaaggacaaagccggatgcctgacactggcacgatgcgccgcaacttttcaaaacattctggaagacatccatattgaagaccgtatgtgtgaggaattccacggcaccttccgacaggggattgaactcaataacctgcgtatgtccgaacagattccttccatacaggaacaaattgacaaagaataccagccattttccatcattgccaacctgatcctttcctattgccggaccggaaacatcaacaatcccaccggctatcagggggattatctggataccatttccgattgtaccgatcttctggatacggcaatggaatcggaaaaaggcactgaccggatgctggtttccaatgcgctcttagccctgacctggaactatatccagccgctcatcgaaaaaacacgggaggaattggaaatgcatggcgaggattccgctgccgatgctctggaagatcttctaggggatgaagtcagcagcggcgctcctcttccgaccggaaaaagcggtgccattccaaagaatatcaaaccagcttccccaaaaggaagcgggaatgatgagggcaatgctccttccggtccacgtaccaaagaggatgctatagaggaagccaaacaggtgctttcggaagaaggcgggcgcatcgctcttacaaagaccaataccattctggatgaaaacaaccccggcgtcacttatgtcagtcagtatcagggcagcggctatgagcatgctgcagaggatctgttccggatcttgaacgatgtggctgcagaaaaggtgcaggaagactgtcagacggaactgaccgaggaactgcagaaaacagccaatgatattcattacggcaatgcccatgcaggcatccatgttaccatccatcgcctgaccagtgtttccgattacctgaagaatgaataccagacagttgctcccccgctcctgcgggcttccaaaaagctgcaaagcaccatcctgccgcttttgaaagaagaacagcaaggcggaaagcagaagaatctcctgtttggaaaacgtctggactcccatgctctctataagacagacggaaccatctttaccagaaccagacttccaggagaggaaaaacgtctggctgttgccctcctgattgacgagagtggttcgatgggttggggtgaccggatgacacatgcaagaaagactgccattgtcctttatgatttctgtaaaagcctcggtatccctatcaccatttacgggcattccacggatgcaggcggcgttgctctttactcctatgcagaatttgattctgtggacaatgaggactgttaccggctgatggatatgtgcgaccgcaacgggaaccgggacggcgcagctctccgcttcgtagcagagcatttgtgcacacgcccggagcttcagaagctgctgatcctgatttctgacggtcagccagccgattacggctacagcggaacggaagcagaggcagatctgcggggcatcaagaaagaatacgaaaaacgggatgtcatcctgtttgcggctgccattggtgacgataaggaaaatatccgcaggatttacaaggacggattcctggatatcacgaaactggaagagcttccaaagaatatggcacagcttgtcaaacagcatctcaaataaaggaaggtgaatactcatgaatgaaacttatcaaaaccggattaccgaccagatctgcaagatccagaatgaccgggcactcattgccttttatgaccggctccgctacgcaccactcggcaactatgcacagctacatgccaaaggggaatatcaggaaaacgggcataaagtacattctttaatctgcatcaccattcaggattattccaacggtaccggagaccggaatatcatcacccgtttcaacctggcaccggaacagatccagttcctcttaacccggatcacttccggttttcaggaatttgaatggagccagagcaagatctacggcaatcccgatcagaacggttattccacagcccagatgttttatatctccagacatccctatgattccaaagggcagcctatgaaaagcccatggaaaatccagattgtaaatgggaaaggcatcaaagcacagaataagaacggtggttcctacatgcagccacgcagcttccagtccgaaaagacgacagccatccagcttaccgacatggatctgttcacgcttctgaagcggacggattcctatatttccaactgggaaacggtgattgctgcatcactgatcaataacggaaaacggatgctggcagaccagcagaacagtcaaatgcaacagacagcacaggctccgccttacgctgcctaaattttcagaagagaagcggtactttactgcttctcctctttttaagaaaggagactttagttatgaatattgcactcatccggaccatggactctcaggggcgtatcgtcatccctgcagaaatccggaaacaaatgaagctctcagacggagatgcactggaactggaaaatgtgggaatggagctgcttttacgcaaatgccctacccacttaaacggaaaagaggaaatggcttcctatctttccgtcctctacagtgtcatccactgtggtatcgcaatttgcagtgaggctcacatactcgtatctgcgggcatctatcttccggaaggcactcccgttacagaagaactcgccgaattggttgcggacggccaggaactgatctctgctgagaactgccctgtctacccggtatccaacacccgtcaaccggtttgtgcttttttcccgattttaagggaagacagagagccgctggcacttcttctctgttccagaaccggacagcatttatccgagatggaattgggatgcgctaaactggtcgctgccgtaattgcaaacaaaattaagtaaggaaaggagcgtgaaatcaatgaagaatacaaatataaccttacacaccacccaaaagaaagaatatgtcctcaccggaatcctgtccctgcccctccatctgggagaacgggcgtggatctatagttataaccagacctttgctaccagtccggtgcagagtattctggaagtatccgaaaacggtgtggtatttgagacctgcaacagtatttaccgtctcagctacacccgtgttccgatggagctggaggcgatgtgtgcttgacaagaatggaagaactggagagctgcctttcggggctcctctccaccttaaagaagaaccgggaacatgtgcctctggaagtgctgaagacacagtataagcagccgtatgaagaactggtcagaaacatcaacctgaccgcttctgcctatgcaaaatctgtgctgctccaccggctggtcctgaatccggatgcagatgtggaggaacaatgtaccgtcatcaaccagatgatacaaacttccgggatgctgaagaaaatcagctcctgcatgtccaaaacctatgatgtaggacagatatatcctctgatactggaactacgccatatggtcgaacaggcactctggccctatgtgaatcaggcaacttgtctggtcgcagatctggatgatatagaaaaagaaccgacaatttacaattttttgacacatgaagtttatgaaaatgatacctggattcaccgagaaatcgacctgcgctggaaactactggtacatcttactcccgaacaaagagaatccgtaccaccagccaatcatagtatgaatggaggaatttaccatgaaagaacaaccatctaatccttgcgagaaagtctcatttattttgacctatgaccagcttgaagctgcttataacatctaccgggaacaatttatttcctgcgacttcatccgccgctccatggaacgtctggaggaaagaatcggactctgcaaccttccatatgaaacgctgcgtgatgatccaagccttcttcatgaagcatacctgcagtttctccgactggaagactgcaatgtggcttataacgacacgctggagcaggtaattgatgcaatcgaacaatggcttgcctctggcaccttatcccctgtaaaccttacggtttccaaccagaatatgggtgaaacttttggaacggaggtggatgtgtaatggcaaatatctgctgtgatgatgtgatcttttatacagaaggaaatccggaaggactatatgacttgtgggaggacctggaaacctacatcattctgaaccagaatcctgatttatgctggattggcaatttattttcccacaagaaaatagattccaccggaatatctcttcgtggaaatgtcagctacatggaatggaatgatacgtatattctactttctttagagacagcatggactccactttatgaagcatatcaggcgatagccgctgcatatcatgttccctttgtgatgcaaagcatagaacctggagaacgaatttattataacacggatgaagcacacctatttttccctgaccgatattgtgtccgcttatatgaagaaagcctattgactccatgtggcttaataatcggagaaaagctggaagacggtgaaccatttgaaacggaaacagacgtattagaacgattcagagattgcggatatccagcagctacactaaaagagttggagctcatgttcgatgcggatgaacttattatttttgaatttacaaatccatatttggatctggagcagaaaaatgcttgtgcatgaaacttctcccctccacaccaaagacgattatcatcagatttaaaggaggaacaccatgactgatttggaactggatgtctgggatgcatggctcagggaacgtcaggaacatctggaagaaaccctgtccaatatctcaccatcggaagaaccctgcagatattacctgctaaccggatatattcagggaatgctagaagctcttaccatgcttacgactgttgaggatgggaaacgcttcaagatcaaactggagcaatttcgccagaatctgctcctctctggagattacgatgctaccggtaactataaacaggcagtgaagaaaactgctgtttaaatacttcgagccgcccaatcggacggctctttttatgcccgaaaacggtagcctacaccacgtatcgtttctatgtagtgcggttcttccggattttcttctattttctttctcagattcttgactaacccatagacacggttatccacttctgactccacatcctcataaatatgctggtaaatctgttcttttgtaaatacccgattgggggataaggccagataaaaaagcaggtcatattcatgtctggtaagttccacaaccttaccatctttgattacgctccgctgaagctggtctatttccaaaccttggaatgtcaacttttcagaatttgtaatctccataacttctaacgtactttcgcaggctagaactgatttaattttattcaggattccctcttcggaatcagaaatggtaagaatcatcactttcccataacatcacctgcttttcttagcatttagctttcactcctcattaacaatgtttatcgattggttacatagatatatgcatcttccaaagttacgtcacaagctatacatccactttctgacggcatattctcccctaacagtcttaatctaattccttcctccgtatactgcttactggaaatatgatattttctttctaattctcttgcaaggctttcgtcctctgtacagcattcccatacatgccctcttgccttattcaataattccctcattgttcctgtataaaggaatctaccttttttcataaccgcaagctgattacaggttgccatcagatcctccaccacatgcgttgaaaataatacggtgcgttcttctgcaaaatctaccagtaaattacggatacggatgcgttcctccggatcgagccctgttgttggttcatccacaattaaaaaatccggctcatggagtaatgcctgcactaatccaactcttcgcttcattccacctgaaagctgccgcattttctttttctgatggtctgcaagactggtcttctccagatagtaatcaatccttttcttgctttctcttttctcaattccagccagatctcccatatactccagacattctcgaacagtcaaagacggatacagatcaatttcctgtggcagatacccaatctttttctgtatcttttcgtaatttgcttcgcaatatagcgtaccatctaacagaacttttccacttgtgggtgcaagcaccgttgtaagcacccgcatcaacgttgtttttcctgcaccattttcacctaacagaccaaatatcccatgtgggatttccagatccacatgatctaccgctgtcactccatttttaaatgttactgttaaatcgtctattcttatactcataatcttaccctctcttctttaatatcttaggaacaaatgcaagcatcatccccgcaaataccacgcacagcaccttcccgccaagccatctccactctgtcagcttaccgaaatcacaagttccgtaggaaaatggtccccagtttttcaaaaactgagttgcctttccggaaatagagaaaaaccagaaaagcagcacgacacccataccaatccatctgtttcgaaccagattgctgacagttacggaaagcacactccaaaacaaaacagttccgggaatcgcaatacaataaattccaaacaaggcaccgccatctaattcttctgtcagattcaccggtttctgccaataaaagagtccatatgccaacaaactgattccaatcagataagctacctgcacaaatagtcttttataaactacccctgcctgcttttttagattataaaggcagaatacttccgagcgtttgctctgcacttccaccagataagtatctgcacagaaaacgactgccagaagcgaaacagctctttctactgcctgcccgatttcattcgcatatacaacaggctggattgcactcaatatcacaacaaaagcgattgaatatgcaattttataatatggcatacatatttttacttctttcttcaatatactctcctccttttccacatccacaccgctataaacatgagcagtatggatgctgccacaagaagcagttgattgagatatacctgatgtggcaattccgtttcaaaaaaattccccggaaatcgaaccataatagagaatggtcttgcatgacactgtcctttgctatcccatgtcagcatattagaataaatgatataaagaaccagcgccggaaccgctggaagcggattcttaaacagcagcgctgtaaccgcatacacacagcagatcatcaggatgttcggcaggacatacaggatcgaattctgaacaaaatccagtatgttcatagcaaatcctgattttactgccgtggcgtaacacaaaatgataaatacgatattcataatgaccagtgccgccgtcataatgagaaatccactgcttattttcccggcaatatattgaaaagccgtcatcggtttggtgtgcagcaattcataagtatttttcctcatatcctggaaaaataaaaacgccagcagaaccgttgcaaagaatgccatatgcaggcttgcaaaatctgtaaattttcttccgaaataataggagaatggatgtttctcaagattttctctgatataccggttgacttcctccgggcttccctgataccatgaaacgtcctcatacacataattggcaccattaaagtggtattccgttttcagatactgacacgcctccgtaatcttcatctgtttcatctcagatatcactgcctccgcctctacttccgacatgccaaacccattctctgtgtcctgaagtatctttacaatctctttctcccacagttctctctccttatccggtgttgccggaatacatccctccataacatccccatcggaggccatttttaccttcctgaaggtttcatccgacttcacgtaatgaatggacagatagggtgcaagtgtctggtacatactgattaaaacaacaatcaaaccgatccagaatatcggatttttaagataatttttcagattcctttttatgattgctttcataagtcatcccgcctttcttttttctacaaacagcatagcctacaaatcacaacaaaaaaacaacagccatttatttctgctgttgttcttctaatacataatttttaaacactgcctcaacttccgcaccgccatctgctacattttttatcagcagtttcccaccatgccgttcgcagtagatacggctgatatacatacccattccaaaatgctttaagtcatcctgtggattctcatgataaaacgcctgtgtcaccctgtcgatattttcctgaaatccaattccgtcatccctgatactcattttcagatattggggtgtcactgtcagcttcagcctaacttcctgattggcatagcggaatgcgttagccaacagattatccgctacttccatgatgatttcctcatccgcagtcagtatttcagattctctcactgtcgtcactgtaaaattcttttctgatttttccaccacgacttctgccagagcttctatctggtttatcaactgccggatatctaccacggaacagtttaattcccgttcttccaatttcgtcatcttcctcatactatcaataaaatggttcatccgttcaatctgaagcataccgccccttaacatctccatcattttctcttgatcaagcatatcttccggaacaaattccaaaagcatttcctgatatccccgcatgattgcaagcggcgagcggatatcatgggcaatcgctgcacgcagtacccgctcatcttcgatcatctgccaaagtctacggttattttcttccaactgcccacgcatcctttcaaattccctgcacagcatccccatctcgtcctcgttctcataagccatatgaaaatccagatcttcctccgcaatcatctgtgatgccatcttcagttcctgaatcggtctctttaatttatttttgtaaaacaggctgaccgcaattccacatccggcaaaagaaaaaagcaatactccgtacgtccgaaggaaatcacaggtttctgaaatatgccagtccattctgctcattttactctgattcggtctcggtaccactacctcaaaattttcattgcggtcattcattgcctgataatactcgtcctgatccacgtacttccaccagacctcctcctgtatctgcccggcaatctcaataattgacacagaaagaaaaaaagtgacaatcaagctgagtatcgtatataaaaccattgtctttttcaaggataaatttcttatcttttccatcgataccccatcccccatactgtctcaatgtattctgtctgcgtatattccgccagtttctttctcactctccggatcagttccgtaacaacacggctgtcaccttccgcatcataaccacacaccttttcgtatatccgctccctgtcaaaaacctgtcctggattcatggacaaaaactcaatgattgcatattccagcttcgtaagctccaaatcattttcaccgatctgaaccctctttgctccataatcaatactgaggtctccgtggaatctgtattcagacttccctttatgacgctcctcacgcttcaaatgtgcaataatacgagcatccagttctttcagactaaacggcttcagtatatagtcatccccaccggataaaagcccgtttaccctgtcctgctcctccacttttgccgtcaggaagataatgggacaagttactttgccccggatacgtctgcatacttctaatccgtctattttaggcatattgatgtccagcaagataatatccggtttcttatggattttttccaaagcatctgtgccatcttctgccatcattacatcatatcgtttgatttcaaaatagttctttaacatctttaataattcgatgtcatcatccacgatcaaaattctatatgccacttttatcacctcgttttatcagtatacaacgaaaaaaacaataaataaacaacaagagaaacacttcgagccgcccattgccggacggctccttttatgcccgaaagcgataaccaacaccacgtatcgtttctatgtagtgcggtgtttccggattttcttctattttctttctcaagttcttaatcagaccgtaaattcggttattcacttctgactccgcttcctcatagatatgctgatagatctgttctttcgtgaatacccgattaggagataaagcaaccacagcgatttgcttcaaaagtctctttcgcctggtataccgtttataacttctcatgtttatcaccttcaatctgctttcaaatttaataatctatattttatgacaattcagcatatagaaaagttagttattcgtgaaaattatttttaaatttagaacttgcataaccactacgatgtaaaaacagtttagaggcatttatgacagagattgattttatctggttttcgactttctccacgaaagtggcaaaaaatacctggctacgaattccttcgcttagggcaaatctgaaatcctgaacgcttttattcctgtagccgacaaatttgtcatcaacataaggcaaaagcttcattgaggaatctatttcatttgacatatactacatctagtgttatactgttcttatatcaattatttgtgtcaatccggaaaggatttatcacacgcagtttaggtttgaaacgtagtcaggagttttcctatgcccaacaagcagcagggacttctggctttttttattttgcaggaaactgcatctattttgagaatgaacataagcgtcattctctttttttatgcctgaacgcagggaaaggaggattacggaaacaaatgattccggaactggcacgccacaaaagaaaggagactctatgtcagtcaaaagaattaagaatcttgtaaaacaactcaatgaataccgtcatgcctactacaatcaggatgcccctctggtatctgatgccgagtatgaccgactctttgacgaactgaatgaactggaggaacagactggtttcatcctgtcaaattctccgacacagacggttggatattatccggtcagtgaacttgccaaagtcacccatccgattccactgctctcgcttgagaaaacaaaactgatttcagagcttttagatttcatgaaaggacaggaagttctctttatgctgaaactggacggtttgactaccaaactcatttacgaagatggcagactgattcaggcttctacccgtggagatggtgaagtgggggaagatattacacacaatatcccggcatttttaaatgtaccgcttaccattccacacaaagaacgtctggtcattaccggtgagtcttttataccaaccaatgattttgaacgtctgaaagatactctgcgtgatggaaatggaaaaccttataaaaacggacgtaattttgcttccggatcagtacgaagtcttgatccgaagaactgtatcggacgttgtgttcgctttcttccgttcaatgtattagaaggaatggaggatgttcccttcccggacagcagagcctgcaaattagaaggtttaacacacctgggctttggttactgcccgtttttctcaatttcaggaaccggactttcaaaagaatatgcggagaaattcattcaggaattggtatccacagcagcaaatttacatcttcctatcgatggcattgtcatgatttttgacagtctcagctactccaaaagctgcggaaaaaccggacaccactataaggacggcctcgcctataagtttgaggatgatacctacgaaactttcttgcgtgaaattgaatggacaccgaccagattcggagagattgctccggtcggcatcttcgataccgtggagattgacggctgtgatgtttccagagcttcccttcataatctgacctttatcaaaaatctggagcttgtacccggatgccggattcttgtttccaaacgaaacatgatcatcccacatatagaggataatctggatcgtggaaggtataccgacatcacgcctccggtctgcccttgctgtggttccaaaaccagaacctacagccgtaagaccagcgacggtcgcaccgtagaaactctgcattgtgataatccgcagtgcgacagccagatcacaagaaggtttgtccattttgccagcaagaaggcaatgaacatcgaaggactgtcagaagccactttagaaaaattcctgaatctgggctatctgcactcttttcaggacatctatcatctggaggaacaccgggaagatattgtggcactggacggatatggtgagaaatctttcgaccgcttgtgggaatccatcaacgccagccggaggaccagctttgtccgctatctggtttccatggatattcctatgatcggcagaaccaaaagccggattctggacaccgtattttccggaaatttaactgcatttgaacaggcggctgtcggagattacgacttcactcagttagaggattttggcgaaatcttaaatcacaacatccattcctggtttgcagatgaagcaaatcttgatttatggaaaaacttacagaacgaattcacatttgaacaaagaaaggaagagaccattatgacaaaagaaaacaaatttacaggatgtaccatcgtagcaacagggaaactggagcattttaccagagacggtatcaacgataagattctggagcttggtgccaaacctggcagctctgtaacaaagaaaaccgattacctgatctgcggggaaaaagccggcagcaaactggcaaaagcccagagccttggtattccaattcttacagaagctgaatttttggagatgattgcataaccatctctgcaatagatgagaattattttgaggtgtggctgaaaggccgcacctcttttacaaaggaggaatttataatgaatcaaacaaatacaagcaagcgcatacctacacagatcaatgaatttcggggagattatgcttttctaagcaatttctatccggcaccggtctcttacatgggacaaacctatgcaaataatgaagctgcttttcaagcgcagaaaacactctctgcgagagagcaacgcaaattctgtatttttcggatgcataatccttctgatgcaaagaaactcggcagagatcttacattacgcccggactgggaaaaagtgaaagtccggctcatgtatgaaatctgcatgtgcaaattcatgcagaacccggaactccgggataaacttcttgcaaccggagagtccacacttattgaaggaaacaactggggtgactatttctggggcaaagtcaataactgcggagaaaaccagttaggaatcatcctgatggatgtacgtgcgaagctgcagtggaatgcagaaacagcgcccaataatatacctcaatgtctgcaataaaggaaaggatggtctaatagaatgaatgaaaatgcaaaaacaaaattagtgcttgagtatactggcatggatgatttttcctgtccggtatataaggaccaattcggaaagttgtggaaggatattgaccttggcaaagagcctgaaccgaatctttattctttatcttttaaccatattgatggagaaccttcccatcccatacagcaggagtacacatttcatccggctccgtatcaaagaagttcctatgaattcgagtaccggatgttaagtaaattacagtctgactgtgaatactatctgggctacggaaatcgcagtccgtctatcctatgcaatcatagcgttcaaaaccatattgcccgtatgaaagaattatggaatggttttcccacagatcagaaaccggaatggctgacctgggaacagcttcttcagtacgaaaaagtaatgacagaaaccggaatacccgtgaagaactgctcagactagacaattcatcatttatcagaaattaccctctatattatccattcatattttgatataataggaacagttgaaagaaaggagcatttcccatgtatctgaaaagaaaagtttacgatcagcttctggattggaaaaacgataccgtccacagcaccttggaagtgaatggtgccagacaggtcggaaaaacatatattatcaataaatttgcggatgagaacttcaggcacaagatctacattaacctgtttgatttgtccggcaaacaatttatggaatgttacaaaaaagccacagactggactcccggtacaaaacgaccggagcagccgcttcacgatgcttttaaactcttcgatccggattttgaagataccaacgatacagtcatcattattgatgaaattcaggaatcctcagagatattcaaccgtatccgagaatttacccgctattttcaagcgcatttcattgtaactggaagttatctgggacgtgtactggaaccggaattcaaattctccagtggagatattaccagtatccgtatttataccctttcctttaaagagtttttggaagcattggatgaccagctttttcagaaatatctatcacttccactggatcatgcagatgacaccgtaccggaactatatgacgaattaaagaatgtttacgacatctatagacagattggcggctatccaaaggttgtggaaacataccttaacacaaaagacgtggaagcagctcaaaaagagcttgttagaatcatccgcattttcttaaacgaatctatgcggtactttgatgacatcacagatattagtgtttttaccaacatctttttaagcatctgccgtattctgcttcgtgaaaagaaaggattagatgaggacagtataagtgaagaactgcaaaagctcgttacaaagaattactccagtaatctttctaaagcaacctgctatcgtgctatcaactggctttatcattctggaatcatcggtttctgtggcaaaatcacagaactggacatcctgaatttcaaaccgggaagccgctgcttcttcatggatcttggagttgcatattattatctctccagaactggtgctactgtatcaactatggatggctcattgaacgaaaactatgtttacattaacttgtccaaacgccaggaattcccggaagaaattatctttgagacaccggcttttgctacttataaaggtggtgaaattgattttgtagctcagacattgaaaactcacatccgctatctgattgaagttaaagccggtaagggaactgcatctactgccttgaaggcattggaacaggggaaggccaataaactactatatctgaaaggtgataccaaaggcggaaccgctgggaatgtacaaacacttcctatctatctgctagaacaatatcatttttaatcaaagaaagaatacttcgagccgcccataaggacggctcttttcatctatattcttgtatatttattttactaacagcgcatcattctttgaaagaagatatatacagtattgattcatactgatgccttctttttttgagtgttccgccagatcccggtgtaagctgcgtggcatccttattttaaactgtcccgaatactcttccaggcttcccggttcgtgaatctcaatcccttcttccagtgcagcttctaaccatgctttttttgcatccgctgcattttcaactgccctttctatcgtctctccacaggtgatgcatcccggcagttccggataagaaaccacaaatccaccttcatccttatcttccacaatttccatgcgataggacattgccaaataatcattcagtgtcttcatcgtttttcgcctcactttctacaatctgctttaccatttcaacataaattttcttgattggttcgtgtttcggtattgttatcggctggcatcccgctttacggaatgtataatggctgctcccacttctcggagcatttatctcatatccataactttctaatacttttcttaattcatcaaaacgaaggtctttcgataatgagcaaattcttgtcaatagtttatcccatttcgacatctttaatgcctcctatctatagtatatgtggtgtcatatgtggtgtcaatctgtttttcatctttcttggtcaaataagggatgtagctctttcttagcatccgctacaaatgcttctttcctcgcacttaccatatatatcttccagagcatcaaatgcaagatttccgcatccaccacactgcatttcttttgaaccatgcggacaaacgggcagattactgtatctgacagcttttcccctttaagcagcagctccccatccgttccatatacttcatacagacattccagaatactccccagatctgtcacaaatcggaaggcgggctttacatatttctttttggcttccatcatctatctcctctacatccgaacagtcagcccgccgaggcgtgtcttcgaaagtcccacaagataccagttctcgtccatttcaatccgaaccggaatccatacatcccttaccttcacatcaaagcagtctccacaatgcagtcccccataataggattcaataccaaaccggatatcatatcttcccatagatggatcataaatcaaagtacctattcttttttcactcatattgctttcctcctgaaattctttgttctatataagtaatagggctttcattctaggtattggaaagttccggatatttttcataaaaagttttacgataccggtaaaaagtcgagtgtgtcattcccagactcttccgaagctgcgtcggtgtcatttttccggaaataacgctctggaagttctcgtcaaaggtttcctgcttcatcacgcttggtcttccataatcatcccattcaccccgcaatttcttcgcttctataccttcccgctgtcgcttctcctttttctccagctctgcctgcgccatagaagcataaagctccagcatcatgttattgattgtttccagcatcatccttgccatcgcattatccatcacagataagtccataagcgtagtcggcagttccaaaaccataagccgcactcccatgtccttgatccgctggatctgctgcatggtgtcatgcttgtttctccccagtctgtccaattctgtaacaatcaaaatatctcccagccgcaggacatcctccactaaaacggtatatctcggacgattaaaattcttccctgtctcctgatccgtaaaaatattcgtaagtgccatctcatgctcgttacagtaccgctcaatttcctgtatgccacgatcaagatgctgctcctttgtactggtgcggtgatatccatatatctgcatccacatttctcctttccctgtcccaaaatatccacacttttgttggcatatctcaaaactgtgtgtgtaacctttttaagatataatccccctttccggaacgtacttctaaaatgtatacattttgggatatgtttcttttctatttctgtacgtaccagagccgaaaagtgcaacaaatatgacaaaaaactcccagaggatgttactcccctgagagtggttgaaacttatagcccacacctcggacggtgcggatgtaattccagttccgtgaatctacttttaactttttacgaagctggctaatgcagcacataaccgcattagcacagtcaatcggttcttccttccagacattacgataaatctcctcgtgagagaatacccagccaggatgttctgttagatattttagtaccgtaaattctttcagactcaattcaatcttttgatcattcataaaaacagtatgacagcgaatatctatctgtaggtttttgtctttgtaatgcaatttactttcctcctaatctgtttcaccttatcacagctaatctaaaatgctattattagactgccaaaactcaaattcaaaaccagagcaatgctttacctgcaaatagtctggtaatagaccagtagaatcgcaatagctgcaagagccagaaacggcaaacacataattaccggggcagagtgaagtgataaataagaaccactgattttttagcatttcagccggatatacaagccatccccatagattggtgaccgttactgttaaaattacagcactgcctatatatgtggcagctcctttccgggtaaagttaaagtcgcagacctttacgacctacggcttaatagtacgaaaagacattaacttttctgtaaaagaatttgatgtactttatatgctatattctaatccagggatggcttttactaaacaacagatttatgaagcagtttggcatgaaaaagcaaatggttatttccacgccgtggaaaacactatttttcaaatacgcaagaagataaaaaagtattccagcgacaagaattacataaaaacagtagttggatatgggtataaatttgaagtttaatctgcaggatataaggagcaccgggtttgagggagattccccactaagaaaatttctatgttctggctacaaagccggaacataggtcggcatccatccctgtttcttcccaatcctgcagacctaataagaaatcagctagtgacttcttcatcaaaagtctttttttagagaaataatccatttttcaatagcatccgccaaaactatctgctgttgcaatactgccataccagtcttagggatttccggatcattctctttctctcgaagattttcctccagataagtttttaatatttcaatattttcctcaatactggcaatacatgattgttgactttcaggcggtaacttatccaaatttacaattactgcattaaaatctaaaaaaaagtgaatgggtttagaggctgtttccatcataagctttacaaattctttttcgccttcatctgttaatgaataaactgctttttcaggcatcttaccttctttcacaatttctcctttaatgaagcctttttcctccaactgaattgcttttttgtaaatggatggtgtactgatttttacccattttgatatattacgatattccactaatttttgaatatcataggctcccatcggttcctttttcaatattcctaacacaattaaatctattgtagccatagttcacccactttctatatccacgaaagctataaaatacttacggttatatatactgtaatttatagtatttgattttatacctcttgtcaaggaaattgcaggatacacgcttgacaactactataaattatagtagtattctctcacgtagtatactataatttatactactataatttatattcttaattgaaaggagtatttgaaatgaacaagaataacaacaaaatggatttattaggaaatgcacctgttccccaagcactaatggctcttggtataccgataatgattggtatgcttattaacgctctctacaatttggtggatgcttatttcataggaggacttggcgagagtcaaatgggtgcaatttccattgcgtttcctttaggacaagtagttgttggtttaggtctgatgtttggcaatggtgccgcctcctacttatcaagacttttagggcgaggagatagggaagctgcaagtaaagtcgccagtactgcattatacagcagtgtttgtattggcgcagttattattatcggaactgcaatttttttgaaacctattttaaccatgttaggtgcaacagacacgattatgccatacgccctttcttatggaagaatctatgttatttcatgtattttcaatgtatttaatgtaacgatgaacaatatcgttgcaagtgaaggcgccgcaaaaacaactatgtgtgcattattattaggagctgtattgaatattggtttagatcctattttcatctatactctcgacatgggggttgctggtgcggcaatcgctacagcaatttctcaaatggcttctactcttgtatatttaatttatgcattacagaaaaaaagcgcttttacattttccattaaggaattttgtccttctaagcagatcataactgaaattctgaaaatcggtatacccacattgactttccagcttcttacaagcctttctatcgcattcataaaccgggaagctaatatctatggagatgctgttatcgccggaatgggcgctgttacaagaatcacttcaatggaaactctggttgtgttcggcttcttaaaaggtttccaaccaattgccggctttagctatggtgccaaaaagtttgatcggctcagggaagcaattaaaacttctatcttatggtcaacaatattttgtgtagttgtgggattgacaatagccctattttccacacagattatttcgcaatttacagaaggcaatacagagatgatttctgtaggtcaaaaatcgctaatggcaaatggattttccttcttcgtatttggattttacacagtgtattcttctctgtttcttgcacttggaaaaggcaccgccggattcgttcttggggcttgccgacaaggtatttgctttgttccgatcattctgttgctcccatcattctggggcataaatggaatactatatgcacaaccgattgccgatgtaatttctgctattgttactgtgtttatggctctacatcttcataaagaactggcaacaacaaaagagcattaaagcatcaggcaacataatagatcaacaccgtctgccgcttcgaactgaggcaatatcacccttcaaaaaacaatcactcccagaggatgttactcccctgagagtgattgcagcctttgtttaagataacttactcaattatctggaatctctggatacactgaagcaatgtacttaccagttcctgatacagatcttcatcaaatctgccattcacaatcgcattcttaattaaaagcggcttatatatctctaaaatcttcagtaccgcatctgcatttccttcttttgcctttaaaagtaatcgttcaaaattcattagttttcacctcccatcaccttgcggatcttccggattgcataataataaatacccttgcatcgctcctctgataacccgtttagcctgctcatttcctcaaaagtacgttcttcaaacacatgctggtaaatcagcttccgttcttcatcccgcagcgtatgaagcgctttcatcagtctttcatctgacatcttattccattctggatatttcccctgtgcctcctgcaataaaagctgctccctcgtttggttctccagcaattcttcgattacaattcttgcctccatctgtccaatatcctccaacagttcttctgcatcagccatctggattttcttctccagataatcatgtcgttttccacggacaaactgtatcagatatgctgtaaagtgattttgtatctttgatcctgtatatgtttttttgttcatttgttttatcctccgaaattttttatcacgttccaaaaaattccgaggatggcggtgagcggcaacaaaacgtgacactgccttcattttttcgaaaaaaagaaaggctggaccactctattcgtagtccagccgatacttctctttctatgtaattgtgtaggatatgcgatgatagtatctcatatactgcatattctaacttctctccgacacattgtatggataagatttttttaacagattcagttcctctttggcttttatcttatgctgtccattcatgtctgtcgtacttacttccatgtttctctatttgtgcatgtgttatcctgcttatcataacgcactttaacgcatttcgtatagtgttaatctacgataaaatatatgcattaagtgaggtgatatagatggtgaaaaaattattgggagatgcagtcagggaagaacgtctccgccgcaatctttcgcaaaacagccttgcggaacaggcaaagatttctttacggactgtctctgatattgaaaactatattggcaatccacagttggaaacactttatgccttggcaacttacttacatatttccatagatgctatattttctaaccagaaaacgaacccggattctaccatgcagcaaatcatggcagaactaaattcctgcccggaggagcagaaacagcttgccctttctacactgcgtggacttctggatggattcaagaacctaagttaaggctctcccgtatccttcatcatctacacattatacaaagacaatctgtgagtaatctgtgaatagtctgtgagttttctgtctattcccattctgatacaaagaacaggagagtacactgccataagcatgtgtatctctcctgcttttttatgccctgcgaaatgcactgatagcatccactacattctgtctcatagtctgatccatccgcagcggttcttcttccatcaaatcaacttctgtgggcatttctctatttatcttagaaacgtcctgcccttccaatacctttcttacttcttcccggatgatttgctgcatcattggccggagcatatccggttccatgcttatactgccattacctgtctcatccgttcttcccgtatatgccagaattgccgcaacgatcagttttgcttttttctctgtcgtattcagaagttctgtcacatacacgtgatctggatccgacttatcaaaaccaatagtgaatacaaacggatttttctttcccataaaatcacactccagcctgtgtcatgcgatacaaaagatcatatccatcggcatttgctttcatatcccggataaaggtatgttttcccaaccggtctgcctgctccagaaatcgttccagaagcactgctccgccgccgataaacaccgtataagtagattttgtatcaatgccccgctctcggatgctgttcagaagatcggtaacaaaattctgaaccatggtttctactgcctgtacaacagcttcctcataatactgcgtttttcccttgatgatactgtcgatatctgcctcctccagaagcatgtcatattcactgttaatactggaaatgatatcgttatacatggtaatcacacctttttccagagaatcacaataatccatatccggtctgccacttctcatcagaagataatcagaagtaaatccgccaatatcaatccctacgactttcggaatctcacggatttccatcatcctcgtcatcatggctgcataatcctgcggaaacgccattacattctgtatacagaggtgatagactttatcgttgaagcacagttcctgcaccttcccgtcccctttgaaatagcgttcatatctctcacaaagctctgcaaaatgcttcggcggaagcccaatcggaagttccacctgaatgacatcctccggctggatctggcttttctgctccagctccattgcaatggcaaataaggtcagaatccagaatcggttccggctgtcctgcgtcttgtctctctggtacggaatccgcttctcactaagggtataatactttccctgatatttcagatacttctctcccctggcaggctttttgtcctgttctgtcagtccagtggtaaatacaaaattacaggttttcatgttccggttcccgtgatccacggctactcttaatttttttatcatgctacattcactcctttgtacttgatacttattctgtacgtaggagatacttaaagtgcaactttttaaaaactatttccataatttttcttcctgtatacttccatatcgttgatatcattggtaaaacacagtataatgaacatattatcaaatatgaatttgcggaggaaaagatactgtgaaaattacaatagaggaactgcaagaatacttattcgaccattataaaaatggtgggattgaccaaagcctgtttatgaaactcgtagaagaaataggtgaagtggcagaagtactaaataaaaaggcaggtagaaaatctgttggtcaagaggatttacaaacccaattaggtaacgaattagccgatgtggtacactacactattgcgattgctgcattaaatggaattgatatgaatgatattatactctctaaggataaggatgcatccataaagtataatcacagaataaatttagagcagtttgtaatggaacgcagaacgaaagataacgactaacagttccagttgttcaggatgaatgacagagcaaaaaaatatgaatttgaagaggtagtgattatgaaaagattgatagcaatggttctttgtcttttatttgttatatctttagctggttgtggaaaaggaaatacaaaaaatttagttattgattatgggacatcatctatatacacaaaagatgacatggatgaagctattgatgttataaagaaacaatttagttcttttgaggggtgtgaattgcacagcctatcttatacatctgatgatgcgtgcaataatgaggataatattgcctggatgaatgaattggaggaagcaaatgacaataaagagagtttcacacaatgtatttcgtttgatagtagtttcaggtcacctaaaaatggaggtggagcgtggaacgctaatgaagaatacacatggtcatggtggttggcgcgtagcgaaggcggaacgtggaaattaatgacttggggatattaacggtcggttcctaagtaacaaataacagtttgtctaagaaaaaaagataccaaccattctcaaaaatgcttagtatcttttttcttttgttctgtcattgtcctatgctgaaagcttttccaccaattccggcaggcacttctcaaataattcccgatatcttcgatacccttcatcccggagtggaccttgcagtgatgtcagagaccaaaggagaagctcttcctcttccacagcatacggagaggtatagacaaattttttcccgtcaaaatgcggttttgataacttcagtatttccgtaatctctccttttgtttccgcctgcataatcatttccactttcttccgatggaactcgcagacgatgctctccagaaatccctgcttcagataaaattccgcccttctataaagttttacaagagcctccactctttcatcaaataacttgtccttttcactgactatcatctgtgccagtgcgtttgcatgttccataaccaatgctgttcccattacatttcctcccataataaaagctggcataagaaatttcttctcacaccagcacgattcttttattcctctgtgatgatctcactgcttaattttccatgtaccagatagcgataattccgtctggaattgacacaggtagacagcgtaactatccgatccgttgccgacagctcggtgccggtatcataatccctataagaagacaccgtatccagaaacgtctgaaaatcttccgcttccgggaaatgatacctatatccctcacttccggttcttcccgcatagcaggaaaagatacgatacttgaggatcttgtccggcaaatagagataaaactccggatgttgttcaaatagctctttgtcttggtacttatccagagttccgaacatgctcccgtttttcatattatgcccgtacacgatcgtattctgatccgtaaagtccggctgattatggcagtccacaaagatgctcccgttgatattggattctcccgaaaaaaggtgatgaagataatatgcattatctttcccctgtaccaccggataactaatatccagtgccggaatctgaatccacgctatgacatccggattaaccgcttttaaacctgcaaaatcaatttctagatacctattcttaggttcctccttttctttctcagactccggtgattcttcttcctctggttcctgaacatattcctgcagtttctcgtaacttacgtcccctttctgatacttcagataagcaccaaagagttttcctgccgctgcgagaaaaacaagcaacaggcagataatgagtcctgcaagaaccgtatttcctttttttctcatgattgttctcctttcggaagagccgaagtctgtgccccggttccttccttctgtttgatggcggctaaatagtcatcaatccccttgtgtttcccgttccactccccgctctcgtccatatcccagaccatccggttcatcggcagggaaagctcccggcagatttcatagaccttattgcagccgttctggataatcctccgtttctccgccttatgctggcagataacaggggaacgctcaaaacagaccgcacacttactgtcatgcttattgcaggctactttcatcttcttatccatgtcatacgcctccaaaagctgtttcatcccatatcctttcatccgctccagcaccggtttcagattccggtactggttcactccggcaacgcacacaaaggtagcgccggacagataatgggctatggtcccttttaaggctccttcggtcagatagacacgttctgcggcaagatcaccgatcacatgtaccggacttccggaggaaactccctggtcataattgacactggacagccagatatattttttcgtgtcagtcacatgatctacccggatctgaaaaccctggatgaacccgtccaaagaaactatgggaatcaggattcctgagttttctgctttgaagttaatcgtccagtttccgtctgtatcccggtagaatcccggcacgcctttcaccatatatccttcttctgccagccttttgaccagcttcttcattccaaacagcgggacactccggtaacgctgtgcttcgatctgttccggttttaatcctcgtctttgcagatcctcctgatgcttcctgttaagcgtgagcatggacagcattctctgatacgtccggtggatttcctctatgggtgcaagctctgccgttgccttttcttcctgtaccggcgttgctttgatataatccgtccggtattctccttttcctaatgcttcccggatctgctgatttgcttcggagagtgtaacattgtgcaaatccgcataaagcttcagcatccccccggacgcatcacagcggttgcaccggaatacattcttttccacattgatattcagttttccatgcgtctctccacaaaacgggcagtcataatagtttccccgccgctttctgagatgcagcacctgcaccacatccagtattccataatcaaacccagacatatcataatacatcccggtctcttcctcctttcccccgcagaaaaaagctctctgcggggttcttccttaaccagccatcggcattgctttttgtaaaattacctttgctgccgccggaaccagattgttcggtccggaatattgctcggcaaaccactggatcgttgacgggctttcaactgccacctgtcccatggtctttccgccgtattttccctttcccggaatcacagtcccgactgccatttcatagttcatgtgtttcatcagttcttctaccggaagggacgtatccagattctgtaatgctccctgcagcatctgtccggtctttggcggcgtagaggcagccggagcggaaccgtagccaggcatttgtccactgccatggtaaatggtgcttcccgccgcctgtgcctgctgatagaactgattcatcatctgctggcctgcatattccggctgacctggcatctctccataagttggcataggggcatttggcatgacacccgaatccggcatggctgcattttccatggcacctgaatccggcatctgtggattctgatatggaattccggcatctacctgtgcaggatcattttcctctcccacatccgcaaactgcacaccatatccggcatccgataatgcccttcctacggctgctgtttctgccatttccagaaatttgtctccaaacttcgggtcatcgctccggaatttctgcgaaaaggaattggctacataattgtcttcctgatcacatttatccagatagatacgtgcttccacaactgccatgttctctgtgaaagtgataatccggctgatgatctttcctgccggattgaccagacgaaaccatagcttccggtatttcacatccagataaagctgctcctcctgcccttcttctccaatctttcttgccagttccatcggatggaagccatccacacggttcaaagcggcaactgcctctgatttcttatacaataattctttcattctctgctcctttcatttagaaaagcagacgttcccctatataagagtaatagtccgcttatttcaaaaattgaaaaatatttttaaacaacaagttttaactgctccatttccggtttctgttcactctgatactgatcgtaatactgtacgatccgctcactcagaatggtgttccttgtcccgctgtcatccgtatggattgcctgacagactgcagcccattcccctaccagataaaccttgcttttcgctctggtcactccggtatagagaatattgcgcttcagcatcatataaaaggcttttacccaagggatgatgacaaccggacattcggaaccctgtgccttatggatggttgttgcgttagcatgttcgatcatttccatctggtcagcttcatattgcacctgccgcccatccgggaatccgatcactgccctggcatttccatcctcatccgtgatacagtccagtatcctgcccagatcgccgttactcgccatctcggtatttttattctgtaaaatcttatcgccaacccggaacacctgactgccgatatgcagttccttcttccctgcgattggcggatttacaaaatcctccagagatttgttcaattcatccactccggcagcactgcgtttccgatacggagtcaggatctgtacctgatccatgccgttttttgcaatctcgtccagataaatcctccggacaatctctgccgcttcatctgctcctttacaggcaatgaactgaaaatcctccccaaagctcagattagtcttattctcctgcatcagttttgcattataaggtatgctgctcaaagcgccctgccggtaaaccagatccagtaccgtgaccggaatcagcccgcaggcaatcagttgccggaacacatccccggctcctacggatggaagctggttcttatccccgactaaaaggactctggcatgtctgctaacccgccggaaaaattcataggcaagatgcatgtccaccatggacacctcatctacatttagaaatccggcagacaggtactcaaaatccggttcaaaatccgtatcatctcccaaaagccccagggccagatgcatcgtggatgcattttcacagccggtactctccaccatacgtcttgccgcacgtccggtcggagccataagctgtacctctgacctgcataacgcctgatggatatagagaatcaccttgagaaccgttgtctttccggttccgggacctccggtaataatactgatgggatgtgcaaacaccatccgcactgcctgtttctgtgtttctgacagcgtgatccccagtgtcttctgtgccttttccagccccggttcaatggacagcaaaaccggcttctccaaaagccgtctggctatcatggaagcggtctgtgtttcttcttcatactgccggatagaatagatccgttcttcctccacaacaatgcttttttgcagcaccagccggtaaagcacctgactgacatcctgctccgatactgccatgacctgcagatcccggttcagcatttccagtgcttccctgataacctcctgacgctgcttaaacagatgtccttctttcattgcctgattcatgatatgtccgatgcacccggatatccgcatgggatcattgagtgcacagcagcactgtcttccgatcgcatccacagtcagaaacccgaagcctttgactgcactcagcatgtaagggcggtgccggataatatccaccgattcatttccgaatttcttcagaatcatattcacttttttgggtgttaccttaaaaggcgccagaaacgtcatcagttcccggaacacctggttttttccataggactccacaatagcagccagcttcttctcggaaattccacggatcttcaagagttcctgcgggttgttttccatgatttccagtgtctgaagcccaaacttccggaaaatagtatctgccatcttgggaccgatacctttgattgcaccggaagaaaggtatcctaagataccctcctttgtccgtggtacaacctccatgaaattttccacctgatactgagttccatgctctccgctctcccatctgccttccatctcaagctcaatctcgtctgtaagcggaagaccgaatccaatcactgagaagccgatgatattccgggatgccagatatttgtctctggctgacagggggacagacgtatcctgtgtggtgaatatggcaatcgtatacccattctcctcattctggaaaatcttatgtttaaatctgcacctcattgtttatatccctccagctttttatccgcatccgttcatttggttttctcattacgccgcctccttcttaattcggaaagtacggctctccgttgtttttgtatattcctcatagatatccggatgctggtttttcagcttctccatctggtctttcccaaccgaagtacgtctggtcggattataggtaatacggtaacggttcgtaccgtcctccagcactgccttgcagccctgccccagctgttccacaaaaggaacactgattgcccgctgttctgcttcgatttcctttttccgtttttccaactgtgacttttcctccgaaagggtaagatacttctcaagattttttgattccagaccggaaagcacaatttccggaatagatttgtctgcaaaaccaccataattacggatatttgccagaaccagatcggaattcccgttatgcggcggtactacatttttcaatacatgttcctgccagaaatacgtttcctgatcaatgatgtcttcttcctcaatcagatcacgctcaatggtgcgatacacaaactcattctcgttatttccatacaggcatgcgataaaggctttctgcatattcatcacagacagataatgccttacctgcagcacataatgagctggaataccctcatcagcccacttatctttcgcattataattgcaagttttacattccagaatcgcaaatgtcccatccggcatacgaacaaaaaaatccacatctgcaagcatgaacggatataatggatgccggaacatgacacgtaccggaaatacttccagtccggtctttttggaaaagatttctgccaccagatcttccagccggtgtccgacttccttggcaacccagttgctttcctcttcctcctgaatgaccggctgcacacctgttttgttgtaaaacagatcccggatagtggcaaatggagagatccccatgattgccgctacatcactgccgccgattccttttttgcggtattccaaccagtcttctcttgacaggttactgatatccacaaccttttccggtgtatactctgctttgttattcattccaattcctcctaacatttgactgctccataaacgtcatattttttccagtcttttataagcgccttcgtaatatcctcctccagcttcaggatgccctgtccggacattccttcacaggctgcaaaaaaggaggcttcattcatggcataataaagatcatgtgccgtacaggcaccttccccgttctgggatacaaatagctccaccacctcattccggatcttctgtttaatgccaagttccttcatcagcagcttcaggcagttcaccggattacggatctcaatgtccataagctgagtaagattcttcatcgcatccacatagcgggcgcatacctgctccagatttttccggaagtccagaatcgttgcccctttatcgtgagccagcttgattggacttcccagactgataacgccgtttggtccgtctgtcaaaagcatcggatacagatttgcaccgctcgctgccacgtcagatgtggtaaaacgaagtgccggtgacaggatcttctcatccattccgtgtgcatccagtgcttttcggtaagtatccagaagttcctgacttcctccgagcttccacatggcagatacaatggaatggtcatagataccagagccctccatgtaaacactgcctttgaaattcagattcagatattcgcaggttgtctcaaacatggctttcatatcaaggatgcaataatcatgtttatccccgccatgtactgcggaaacctttccgtccgcaatcttaatcagggcatccccttttgcaacccgcaggcagtaattgactaccttcgcatatgttgccttatccagcttgcgaagcccgtctccattgacacctgcgcggcttaaaatggtgcggatggcacagtcacgtaccggataggattctcctctcattttcagtacaagctgcgtattcttctctgtatcctccaaaatttcttccatggatgcatctgccgcatccagattttgagcctccttttccagtggtgccagccgtaacgtattcgttggctttctgatccatttggcatttcttcctctctctgccagaaactccagcagatcttttacttctgcaaaggatctctcaaatccatctgcatacactcttgcttcattcatgttcttattccacctttcttaaaataatatttatccatcaacagccgaagctggttgtggcatgcaactatgccgaaacctaaatgtaagcacaaaaaaagaatgaaaagagagtcttttctctgttcattcttaaaagtctggtttcttcctgaaaaaacaaaagtgccacgcagccaaaaaaggcataccgtgacactcactacaaacataaactacttatgccaggaatcagctcctgctgtttcctgtaagtttggagattcttatgaatcccgaaactccccaaaaagggtgtgcataaaataaactatatcagtatactagcacaagatattcctcatgtcaattcaggcttatactatatatggtgtttatatttgttcaaaatactacatctatttttctactacgaattcaatcttctctttcagatactcccggcagccaaaccgaaccgttccacactgctttgactcctctttcgccttttcattacagcagtccaagtagggacaatcgttacattgattccgcagtgcttccttcgcccattcaatttcctgctcatttcctataatccgcacagacatccacttcctttgctatcatcataccccaaaatccattttctatcatccataatttctttttttgtatcattttagtaaattacggttatattacggaataatcactatatttcaaatatatctctattttattccgtaatttgctgtaagtaaatagtttaaaatgtggaagagaggtgtaaatgtatggataaaaactttattggagaacgcatcagcgaactgcgtttaaagaaaaatgtatctgaatatcagatgagtctggatcttggcaaaaataaaagctacatccagtccctcacttccggacgttctctgcctaccatgcagagctttctggatatctgtgactatctggaagtcactcctcaacagttcttcgattcagagctgcacaatcttcctctgattgacaaagcaactgatctgatgaaacaactcgatgacgaggatatgcttgcgctcatttccatgctgaatcgtctggctctaaaacgcaaatagatttccgtagctgccaaatcaaggcagcttttatttttatcattttttctcaaaatttttcaatcttaaagaaaagtcccctattccttaattgaatgggtaatatatccattcgccgtaccttgaaaacaaaagaaatctttcgggagattgatataggtgactgcagatagtttgcatcttcgcacgcctgcagcttaatagttacaaagtaacaccgttttacgtggccggaacgggcataggaactggcttctgaaagaataacatagacttttgggattttagcttatagcgcttttattagagaacttttactcaaaatttgatataataatagacaggtatcaagttgattccctgtctgtggaaaggagattcatgataactgtaacaaaaagggatttgattgaattaggctacggtccttcctttgctgctgatattataaaaaaagcaaaggaacttatggtagaaaaggggcatacctattatcaatccagaaaattagacagggttccaaaagaagccgttgaagaattattagggattactttgcccgataagcaagaatgatcgtgctttttgcattttagtaaggagtgaaatcatggcaaaagatccaattaaaaaagcagaaaacggcacttattattttcgagccaatctcggatatcatcctgtaaccggaaaacagattcaaaaataccgcagcggattctcaaccaaaaaagaagcccgtgccgagtattccaaattgattcttgcatcaacggaagaattagctgataagaaggaagacattaccttcaaaaagtttattgaagaaatctatcttccgtggtacaaaactcaggtgaaagaaagtacctacaagaatcgttactcgaccattcaaaaacactttgcctatttctacaagaagaaagtgtccgaaatagaagcgataaatgtacagacctggcagctcaagttggcaaaacaattcagtccaaactatgtacgcattgttcagggaatgttatgtttagcttttgaccgggcgattatcctcggacttgcaaagaagaatcctgcccgcatgatcggcaatatcaaatctaaaaaagtaaagatcgacttctggactttggaggagtttcagaaggtaatatccctgctgtacaaaggtgactactacgagcactatctcttcatctcgttctggcttttatttatgactggaatgcgtattggagaggctgccgccttacagtgggatgatattgattttgaaacaggtatgctgattattagtaaaacactgtactataaaacaatgaatgactacaaattcgttgaacctaagacgcaggcaagcaaccgtaccatttatattgatgctgataccatcaaggaattacaagaatggaaggcggttcaggcaaaggttttaccaaattgtggattcgtcctgagttataacagtacacccaccagcaaaacaacacttccaagagcattggagaaattggcaaatttagctggtgttcacagaatcaaaattcatgccctgagacattcgcatgcttccctgcttatcagcatgggcgaaaatccactgctgattaaagagcgtcttggacatgaaaaaatacagacgacactaggaacttatggtcatctgtatccaaacaccaatattgagattgcaaagaagctgaccggggttctcagctaccagtcagcttctcaaagtattgctaattataccagtaatcagcatactgcaatgtatcacaaagaaatataaaaatgcaatgataatgcaatttcaaacacccaaagccgcaaagccccgtggttacgggctttgtagcccagcgtcaactattcaaactctattgttccaggtggttttcccgtcagatcatacactacgcgattcacatgatttacttcattgacaattctgcttgttaccttatgcagtacttcccatgggatctctgctgactctgctgtcataaagtcaatcgtattgactgcacgaagtgcaactgcgtaatcataggttctttcatcacccataactccaacgcttctcatgtttgtcaatgcagcaaaatactgtcctactgtcttgttcatgcctgctgcgtccatctcttcacggtaaatagcatctgcatcctgaacgatttttactttttcttctgttacttctccgataatacggattccaagtcccggtcccgggaatggctgtctgaacaccagacgctccggaagtccgagctccagacctgcttttcttacttcatccttgaacaaatcacgaagcggctcaataatttctttgaaatctacgtaatccgggagtcctcctacgttatggtgagacttaatcactgcggattcaccgccgagaccactttctactacgtccggataaatggttccctgtaccaggaaatcaaccgttccaatctttttcgcttcttcctcgaatacacggatgaattcttctccgatgatttttctcttctgctccggctctgtcactcctgcaagtttctcataaaatctctgctgtgcgttcacccggataaagttcaggtcatagtcaccttccggtccgaagattgcttctacctcatctccctcgtttttacgaagaagtccatggtctacgaatacacaggtaagctggtttccgattgccttggaaagcataactgctgccacggaagaatccacaccgccggaaagtgcacacaatacttttccgtcgcctacttttgcacgaatctctttgattgagttttctacaaactcatccatcttccagtcgccggcacatccgcacacatttctcacgaaattgctgagcatctcttttccctgtactgtatgaagtacttccggatggaactggatcgcatacagctgtttttctgcattctctgcggctgctaccggacagtctgccgtatgtgctgtaatctcaaatcccggtgcgatctgcgcaatataatcaaaatgactcatccagcagattgtagatgctgacacgccttcaaatacttttgaagaggctttatcaatcaacacctcagtttttccatattctctgacatccgcacgttttacttcaccaccaagtacatgcatcatcagctgggctccataacacagtcccaatacagggattccaagttcaaacaattcttttgtataggtcggggagtctgcctcataacaactgttcggaccacctgtcagaatgattccttttggattcatatccttgatcttctgaaggtctgttttgtaagaataaatctcacaatatacattgcattctcgaacgcgtcttgcaaccagctgattgtactgcccgccaaaatcgagtacgattactaattcgtttttcacaaatgtttcctcctaatgtttatcctagtatttttattataatgtagcacttctgaatttacaagtttcttttcttgtagtttcaccagttttactttcaaatactctaattctaatctgtctgatcaaaggatatagctgtctgcattgatcactttcgcaaagagcagatcctgaattccgatattcttaccaggcagctcttctccatcagcttctccaatttgcgctacattttgcgaaatggctacaatcacacttttctgttcttcattacacaatacctgtgcgcagttttgaatcctgaggtaatttaatatcaattccggcgttacatcttgtgcaatctttacagtggctatatttcttacaagaacttgatctgaagaattttcaagcaatattttatctatgctaatattaggcttattttcaatgattctgccctcccattcaaattcaagtctctgatagtccacatttaactttttaaatgacgcttcttgatttttcatcaaaactaccgtttcctttaccatgagttttgaaatcaactcatctaatgtatctaatttgacatcttccggtacttttagatttccgtacacataaatgctgtctccctctttcttcagtaattcttcatttaaaactgcatctccataatgaagtgccattcctgcagggatgactacaaaattcacttttgcatcaaatagctcgatacacgattccaccatttcttccggaatgatcaactgttctgtaacaaaccggacatttttttcgactagcttttgcagatctaccgatttatcctgaataattactttgtcttttacataatatttgttgccttcttttgctctcaaagggaaatatttatctacaatgaatgtgtcatttaatatcatacagtcatccggatagatcgaaacggaattacttgcggataattttgtcagataacccgaaatactttccgcgcatcgaacagaaccgttcacatgaattttctcatatttctctaaaatttcttttgtacctgaatgtatattgagggctccatttacgattaacaatgtatgttcctgaacaaccatagaatctgttatttcatacgatccattgattacttttaactctgtctcaacatcatctgcaatttctattgtataatcttgatttatcgtgacaggaagacgatttaaaatacttttactggaagtactgacgataacaatatctgcattgattatcatgtttttatagttgttgtaatcttcttctttcatttttctggcatcacagatatcacaatttaatacatagtttttcttatcaaacatatttgttccctcctaaaattctttttaaatgttgacgtgcagaagaaagtttggatcggaccgttcctggtgaaagcaaaaggatatctccaatttgtttggaattatacccttccaggtaacgtaacgaaaaaattactccttccagatccggtaaagtttccagcagcttctcccattctaatcgaaccagttcttcagaatctatttgtagctgcgaaaactcatccgagatgatttccttcttgccatgtctgagccgatctacatataaatttttaacagttcgatataaccatgagcgactttgctgttctttcagtgtggataaggtatcctcatgaagcattgcgcgcaagaaagcttcatgcaccagttcctccgcggtatacaggtttcctgtcatactatggcaccaattgatcaattcctcataatatttctgatacagttcctctatcataccttgcgatcctttcttttgcctttcacttataagacggataaccggacaaaagtgttgaaaaatatttctctatcctcatttcctctattttctatttctttgtatactgaaaaggccaatgcactttcgtacatcggcctttggaattctctcccttaggtttgcttagtttggggaatttggagtcagattttcatctaacatcatatttaggagggctgccgttaggcagcgtaacgggagatttcctttttcagttcttcgcaatgatcaccgtaaacctgcagtgatatcacgttgttcagcccgagattcatgattcctaaaatagattttgcatctaccacaaatcttcctctcttcatatccatatcatatggatactttgccactgtatttacaaaatttagaatttcctcggggtttttaaagctaactaacatttcactcatcatgaatactcctcttctatctatactgatgtcttcctatgatgccttccatgttttacccttacgaggttatcacattctttcaaaagaaacagggtgaaatatcttaaaaagggagatttttttaatgaaccgatttcctgaagtcatttggaagcatcccaacttcctctttaaataccttactcatatatttcggatctgaatatccggcaagctccgcaatctgattcagtttcaaatgtgtatttaaaagcagttcctttaccttctctatcctgtatttgcggatcgtctcggtaaaagtacttccggtttcttttttaaactgtgcgcttaaatattcttccgatacataaagcttattcgcaatctcctccagcgtaatcccctgatcataatatttgcggatcagctttttcgcctgttttaccagaacacttgtctccccgccttcctcttccgtctcaaactcaaacaaaccgaaaaaggctttcaatgcagcttccagctggttccagctcactgctactgtaatttcctgcaggatattctgcacttccagatccagttcaaccgaagcttttgccttatagattccgaatacagctaagctcaaatgaatgatcgcctgtttgatatctgccggtgtatgaaactcttcctgatagcagttcgccagtttccagaaacatttttttaattcctctttgttctcctgtaaaaccgcctgttttgccttttcttccaattccacaggatattttaacggtaccggatgctgctgctcgatcaactcgttggtgatcagtgttcctttcggaaacatcagattccattctctctgtacacggatttcctgcaatgcagacggcatatccaacagccgttctaccgttttccagaagcagaccaccggagtttccagctgactgcaaaccattgggacaacggacttttcaaatcgctctttctgggacgctccgtctttcacctgataaatcaccatcgtcaacagctgccagctgtcggattccaaaatgcaggacttataatgtatagcgtgatcccccaccgcttccaaaatctgcctggccaacgacttctgttttctgtaactgtcccccagccacacaccaaacagctctgccggttccttcagggaaacaccgtatttttgctgcatcgttttatttaattgtgaattctgtcgcacctggccatgcatgcaggccagcataatattttccacggaaaagatctgctttgtcccctgatcctctgaaatttctctctctgcctgttttaaggcacttttcaattccggaatcttaatcggcttcagcagatagctgtctgctttgagttcaatcgccttttgggcatactgaaattccgaatatgccgaaaggataatggctttacattttatattttcctcccgcaatttcttcatcatggcaatcccatccattttgggcatccgaatatccataatgaccagatccggattcagttcacgaatcagctgatagccggcttccccatccgccgcttttcctaccagctcatattccggattgatcttgcttagaagttttgccattccttcacgaatcggcgcttcatcctcaaccactacaatacgcatgtagtttcctcctctatcggtataaataagtgtacttttgtatagtttccaacttcactttcaaaatataatgctgcctgtcccccataatacaatttcaggcgctttcttacatttgcaattccaagatgtccttccatctcgcactcgtcctgattaagtttggctaccatgtccggatccattccctggccattgtcctgaatcagaatatgcagctgttctccgcttttcttcatgcggatattcaaagcacacgtttcctgatctgcaaacgcatatttgatcgtattctccacaaacggctgtaaaagcaatttgtggattctgcattccttcacatcttccggcatataaatctttacatccagacgctttccgaattttgcactctgcagcataatatattgcttcagccaggcaatttcttcgctgatactcgctgttcctcctgcatttttcactgtataacgcagaatgtccgcaagtgcaccaaccattccactaatctcatactgctcattttcaatcgccttccagttgatcgtatccagcgtattatagagaaaatgaggatcgatctgtgcctccagggctgacaattctgcatttttctgatccagaaccgcctgttttacttttgcgatcaacatctccagatgtgcaaccatctcattaaatcctgaactgatctgttgtatctccataggcagatgcgggttcactctcacctgatgatcaaactcaccctgttctacacaactcattacgccggtaattgattctaccgcctgaatgtacggtttgctgaaaaaatgaagcaatataaacacgatcacgatcgtcatgctgataatgataagcagataaatccattgactgacggacattttccagtaatacgaaagtggctgctcattgcagattgcaaatccgctgatttcatggtctgctgtcgtatactgataattttcgggatcctgtatctcactgagcttcttcccgatcttatttggatcaggcgcgctcacaatcacatcgtcgctcagcagatattctctggaaccaatatccgatgcaattgctctgcgaattctctcctcattgacacttaacctgaatccgtgaagttcaactccccttaatcatcgaaagggctgaatttccaatggttttcaagatgtttccgtattttttattttcacctgttgggtgaagtctctttctggtataatcttcttagaaatttacattacaaaggagagaatatcatgaaaaatataaaaattgaatttaccaatgaacgtattattcctgcaagcggtcttgctgttgtaggtgctatccttggcaaaagcaattttgtaaaacgctgcaatcgaatggatgtaactcccaaccgttcgcagcatcagattaaaaatggcgacattctcctttcctatattggtatgttgtgtatggggaaaccacaatttcaggctgttcatgaaatggatgatgaccgggatttttataaaagtgctcttggaatcgcctacaacattccatcagaagaaaccctccgccagagaatggatgatattggctcttcccagcgagaacatattctggcagaaaacgtggaacttttgcgttccaatggaatcgttccttccaaacttcccaatggtttcgttccggttgacattgatgtcacaccatttgacaattcgaaaaccagaaaagaaggcgtatcacgtacttataaagggtatgatggatatgctccaatcatggcttatatcggaacggaagggtatctaatcaatgcacaactgcgtgagggaaggcaacattgccagtgcgacacacccggttttctgcgtgaaacaattaaactgtgtaaacaactcacaaatgagccgctccttatccgcttagattccgggaatgatgccgcagagaacattggaattctgttggaaagcggctgttatttcattataaaacgaaatctacgccgtgaaagcagggaagcgtggttcgagatggcaaaaaccaactcgcaaaatatcacatccccacgtgacggaaaaaccgtctatattggaagtgactggaaagatgtcacttatcacacagtggatggcagtgataaaaccgttaccatacgtacaggatacgaaatcatagaacgcaccatcgataaatatggtcaatttcttcttccttctgatctggaagtgaacacttggtggacgaataccgggatgatagatgaagaagtcattcagaattaccatgcccatggtgaatgtgagcagtttcacagtgaaatcaagaccgatatggatgtggaacggctgccttccggaaagtttgacaccaatgaactggtgcttgaattgaccattcttgcctacaatatcctgcggatgattggacaggaatccattggcagaagaaaaacacgccataaggtacatcgtcgcagactccgtacggttatcagcaacatgattatgatggcaagccatgttaccgagcatgcacggcaattgattatgggtctgggcaaaagtaatgtctggcgacatacgttcgccgaaatatatactgcatttgcacaattcagtatgtgatgattttttctattttacttctatatttcgccatgacaggtagcgcttaaggggggcgtctgccctttttaggcaatgcctgtggataaacatgctgcttaaggcaacgatgatctttacaaagaagtgttgcatgccacagaatagaaattctcagtgttgatctgttcccttcagggatcaacattaaaaatctccgaacttcacggattcaggacttaatacgaccgttccctgaaaattctcgataatacgatagtctgtaatatttcttgcaatataaaacatgtaatgattcttgtcagcaatcttcactggctttccatctccgaaataaacagccccccgttctattttcggaatctcaaccttatctgcccacgtctcacttccagaaaatgacgaaagactctcataatatatgatctctcctgtctttaactgtatcgtgattccctccactccggtaaactgattgcagatatgactcagttttttcctgagactggtgctgttcctctcacgatcgccccggttctcgttcaattctctcacaatttccagaacatcttcatccgtgctgaaatcatataagattgtctcgtacttatccagaaccatctccagatttttctctgcagtatccagattactctttattcggtctgatagattttcttttaaccgctgctgtatattgatctgcgagataattgcaaagatcaaaaccggaatcaatgctgtcaaaagaaaatttgtcattaatctgcgtttcagggtgcctcgtatttgcccgttttttccttgtctcaattagcttctcctgtatcttactttctattctcagcatacctgctgactttcttccttattatagcacacattcctatgtcagctcttgttcttttcatgctggtgtaaatatttttcttttgtagccagtccaccgcgtatgtgacgctctgatttattcatatccaacacttttcgcgcctttgccgccagtaccggtcgaacctgaagtaatctttctgtcacatccttgtgtttggtcgttactatttagagctgttttattttcacattcgtcttccactaaaatgctttcatttaatcccaaatcacctagtaaacgaaggtaaatatccacatttccatctttgtctacttctattttcttaatcagtctctttaactgtacattggtcatctcatgaacatctgtaatatcctcaatctgcttaaaggtatcatttaagattttttccatctgatctccttttgtcaaattactggataccattttcaattcattttccagacgatccagttcttggcgagtaccccctaacttatcattcaattcttctctggaaatcaaatcatcggtatacatatccatatatttctgtcgcactctctgtaatctagcaatctgcaaattcaattccttctcgtactctgcattttcatcttttgctttgtacactctttggaattctttcacaacatagtcaattactttatttttttgctgaagaacccgattaaaatattcctgtaaaatctgaatcaattcttcttcatctacaaccgttttatttggacagctatctgctcctttcccatttcttccagagcaaacccaacgcacatacgtatttttgtaggtacgaactgttcttcggaaagaccagccacattctttacatttaatcaatgtagaaaacaaatatttgttactttgtcgctcatgattcagattgaatgcatcgtttcttccacgaagaatttcctgtgctttttcaaacatctcaccttcaataatacgaagttctggacgttccacaacaagccattccgtctcatccttctcccttctctgaccagtcagaaaatcactaatttcctgctttccattgataatcttccccgtataaatctcattggtcaaaattcggcagatagcattctggctccatttgcaatttctctttgtccgatatcccttttcattcagcatattagaaatcttggcagcaccgtaaccttcttctgtataccacttataaatttgctttacaaccttcgattcttctttgttgatctcaagattgaaataatctccgattgttttatcgtatccgtatacaatgttcggaactcgtcctttttctgcgtttagtttctttccaaatttcactcgcttagatgtattggcactttcttcctgagccaatgctccaaagatggtgagaacaaactcactatttcccatacttgtcatattcgctgtaaggaactgtgtttcaatacctaacgctttcaacttgcgaacattctgtaaaagatctacggtatttctggcaaagcgagaaatatcctttacaacaaccatatcaaacattcctttttccgcatcggacatcatgcgaagaaattccttgcgatttttgattttcgttccggaaataccttcatctgcatataattttattaagacatctcctgtacgctgagtgtattcggaaaaaaattccttttgtgcctctaagctgttaagctggtcggctttatctgtggaaacacgacaataggctgctatcttcatagtgttacctctctgtattaaacttattttctgttacatctatattatatatcaaaataaagattcgtaaacagaaaattctgttttactataaaagctaccatcattaagacagtagctcttactaatatacatattaaatctttacatctgaatatccagcataaaaacaagttcctatattcccataatttccataattaccaatgttcccatagtttccatatacaccataacatatcgatttataagctgaattattattataaagtaatctccttttatctactatttctcctaaataatatccctgcatattaataaaaataccttcattctccaaataatgaccaatgtttctcccctgaacatcatgcaattgtccactcacaaaatttgctatatgtctaccatgactatcgtgtaaatcaatcatattttttattctccttatcctctacattgttttcgtaatgcttctatcgcttcattaattgcatcattatcaggttcattattatcccattcatcccaaaaatcctttgttgcactaattggtctatgtgtatctaacggtttatctaatactattttactaggtaataatatagcatctcctaccactaatgcttctcccacatcaagcaaaggcaagaattctattgtacttttcaatgaatctggtagcagatttttaattacacctttatctctttcattagtcaatctcaaaaccacaaaattattgcattgacttaatatagttttactaacatctgctggtcgttggctaactgccaaaatcgataccccatactttcttccttcctttgctattcgctcaaaattatataatgcttgcttttgaaccgcatcagcatcctcctttataggtaaatacaaatgtgcttcgtcacaaacaagtgtaaacggtgttcgtttttgttcattcatccaaaactgaatatcatataataatctcgccaacgttcctgttacaacaggtagaacatcagatggaacttctgagaaatcaattatcttaatccctttttgaccactctgatagcctaacaagcgacaagccaaatttgccaaccaattatacatttgaatctcatccgttggttgaaacataaatccataagttttatctgcaatcttagtttccaatctagaaatgaatcgtgttaatttaccttcccattctcctttaatcggaccatttttccccataccttttctagtatcatcatcttttaacaactctaataaatctgtcattaaaaatggaatcggcgaatcaacagtaaatgttttcaatgtatctgtctttccttctctagtcaacgttgcttcttttaaactgcgaatgtgcaacgtaaatcgagatgcctgattcggagcatttgaatcacttctatctaaaatcattgataagagttcttctcggttaagtaaccaatatggcaagaacaaagcatcgtcgttcgacgtttccaaatccccaggacctgcaatcttaaaagattgtgcaattgcatctgtcctctccgttaaacttttatattctccatgcatatcaaacacaataatattagtatatttcaatttacttgctttttctaatatatttgccacacaccaactttttcccgatcctgtacttcccaaaacagctgcatgtcgctgaaaaaacttgttgccatcaagtactgcttctgcacttgtatccatcataaaagaaccaattttcaatcgtttatctgtatcaatatctttccccaaaatattcataaaattttgaaggttctgacctataatctcataacatttactttcaatttgcggaaaagtttcaacacctcttttaaacaaatcatgtacagaaccgtatacagaataatatgtacctattacacttactttaatgtaatcagtggacgatgccatcatctcatcaatttcattatcttcgtccatataagtctccatatactttcgagtcactttgtcaatgagtgcaattaaattttcatgttgctttgatgtttctatcgccacgagatttcctacacaaatcttgttcatcagattactattttcaatttcaataataatctgctctgtatcaacatgtgttacatgtcctaacatatcattttccgaaaacactaacaaatttcccatcaaaatacctcctttatcatttcatgcaaatcccacaaatttattcctgacaaaatagtttcacctattgaattcaatatttttgtatcattactattggcatgacaaaccgcagtaattccagcacattctttaactatgttttccgcttttgttgacaatgaatgagtaagaatagttgctatatctctggaaagccttgatttataaggttttccagagatttttctttttattggctacaaattggctacatctgccatttggctactatctgggactgttgttccgttgatagcttagaaacagaaacacccaaggagataacaaatatgtttgatagcataggaaaattaacaagcaagatacagtttgaataaaatttccggatgccaagtggcacccggaagtgagagagatgtcctcaatcgtgctaagacgtttgtgatttgtaacgcatctgcaacaaatcttcggataaaccctgatttttccgctgttttcggttacctaaacgttaatcttagttctccaagagctaatctgacctacccaagagataatcggttctttttgctggaaaacggaagtgaaattttgtataatatagaaaaatcagaaaggggtgcagaaatgaagaatggaaagatctgcattttgattgcagatgacgagaaggaaatccgggatattttgcggctgctgctgacgggggaaggctatgcagtttgtacagcggaaaatggaaaggaagcattagtgttggcttcggcggaggtagatctttaccttttggatgtgaatatgccggaactatccggttttatggcgggatcagaaatccgaaaacaatttaatgctcctattatttttctgacagcctattccggggaatcggacaaggttatgggcttttctgcgggggcagatgattatattgtcaagcccttttccaatatggagcttttgatgcgggtgaaagcgattttacgcaggagtgcccgtgggacggcaccagcgcaggaggaaaagaagagccatatcccttttggggatctaattttggacttggaatgccaatccgtgctgcgacaaggagaggtcattgtcttaacgtatacagaatttaaaatactggaattattggtcacccataaaaagaagatctattctctggaaaacatttaccaaagcatttgggaagaagatgcggtgggggatagtgctatcatggtgcatatcaaaaatatcagaaagaaactggaggatgattccagaaatccaagatatatcaaaactgcttggggacgggggtattatgttgatcagtgaaaaaagaagaaatacccccaaattgtccagagaaattatggggcttttatgtatcacggcggcaattgctttattcttctttggctttttatatttgacggcaaatgccattgcttcgacttatctccttgaaaatgatattttgctgacagaaggacagctgctgacgttgcagggggggatccgcagcctcagcctattgtcggcggtgcttttatttcttgccctgtttttgtttcttttggggcagaaaatggcttatctgagggagatcattcagggggtggaagccctgcgtacccatcggatggattttaccatgcccattgagggggacaatgaattgaaggaactggcagaaagcatcaatttcctttcggaaacggaacggcggctgcggcagctggaaacagagttgcaggcggaaaaggaacagttgatccgtgatctttcccacgatatccgtacccctctgacggcgatgttatcttattctgattatttggggcggaaagagacattggagcaggaggaagtgcaggaatacattgccctggtgcaacgaaaaggccagcagatcaaggcactgactgacagattattggatagcggcagcagagatttagaaaccattgaggatggcaagctgctgatggagcagcttgcgggagaatgggaagaaattctggagaatacgtttccctgtatcgtagatacaaaaaattgtcccgcattctatggatctttcgatattcaggagctgcggcggatctttgataatcttgcttctaatgtggaaaaatatgcggatcgggagcagcctgtggaattgcggatcgatgctgtggataaacgccttcgagtctgccaaaggaatggaatcaaaacgggcacggttccggtggagagcaatcaaatcggcttggaaagtatccggcggatcgccgctttgtatggcgggatggtgaaagtttccatagagcaaggaattttttctatccagatcacgctttctgaggttgatgggtcacatctttagaattctttagaattgcttggcaaatttctttagactgctatgctatgatgatctcagaaaagaaaaagaaagtgaggaatgtattatggcattaggtttattgttagttttatttatggtaatgagtatcattagtgtgatggggttggtgcttttgttccttttgaaaggagaaaaagggcagaaggctgtgttttactttatggcggtatggggcatggtcatcgcatggatgacggcgaatagctatcccaccaattatattaaggagcagttgatcgcctgggcgtttggtgcacttgctgtgattgcactgctggtacagatttgtggcaaaagcgaaagatctttcctgacagcaaaggtgttggtagcggcatctgttgtgctaggaatggtggctctgtttgtaatataatgtaaagaatgctccgtaggaaagagatttcctgcggagcattttcgttttgggttgacgctgaaatgatatgggggtatgatgaaaaattagagaggaaaaaagaagacgaagaaggagaataaaatggattcattacaaaagatatattgcagggcattccaaggggcattcgctgtgcggtttatgacaaggtggtggcgaaccctaccattactaatattgaagaagccaggacactgtatctggaaagcggcacaaaggcgatcattgcctttggcggcggctctgccatggactgtgccaaggtgacaggggcttgtatcgtaaagcccaacaagcctatccataaaatgaagggattgctgcgcatctgcaagaaattacctctgctcatcgctgtactcactacagccggtacaggcagcgagacaacgttggcggcagtcatcacagacagcggcgcaaagcataaatatcccatcaacgatttttctttgattcccagatatgcggtattggattaccacgtgaccctaggtctgcccaaaaatatcacagccacaacgggcatggatgcactgatccatgcggtggagacgtatatcggtagaagcaccacaaaagagacgcgatttatggcagaacaggccaccagattgatttataaaaacctgaaaacggcttatgatgatggacagaatgtgaaagcaagagaaaatatgctgcaggctgcctattgtgctggcattgctttttcccgttcctatttggctatgtccatgccattgcccattctctggggggccaagtatggcgtgccccatgggcttgcaaatgcggtcatcctgccttatttcctagaggaatatggccctgcctgttatggaaagctggcaaaattggcaagatgcatcggtatggtaccaaaacataccaacgaccgcagagtggcagcggcttttatccagtggataaaggatatgaatcaatatatgaagatcccagaaacgattcagaaaatcagaaaagaagatatccctgccatggcaaaacacgtggcagccgagggcaatcccctctatcccgtgcctgttttgatggatgctggggagttggagatcatgtatgaaaaaattatggagaaaaaggagggaaaagcagatgcaggaaaagattcagaagcagagggagttctttcgagggggaaaacccattacattgtccttccgtaaagaagcacttaaacgtttgggccgtaccattcgtgcccatgaggaagaaatttatgaagccctgcggaaggatttgaataaatctaaaacggaagcttatatgtgtgagattggcatgacactggcggagttgtcctatatgctaaagcatatagatggctgggcaagaaaaagaaatgtgctgagccctattgcacagttttccagtgacagctttaccattagagagccttatggagtggtactcatcatgtctccctggaattatccttttatgctgaccatagaacccctgatcggcgcgattgcggcagggaactgctgtgtggtaaagccttctgcgtatgcccctgcaacctctgctgtcatctgcaaaatcctcagagaatgtttccctgaagaatatgtattggcggtagaaggaggcagagtggaaaatcaggcattgctggatcagagatttgattatatcttctttaccggcagtgtgaccgtgggcaaagaagtgatggcaaaggcagcaaagcatttgacccctgtgaccctagaattgggcggcaaaagcccttgtgttgtagaaaaatccgcaaagctgaatctgacggcgaagcgtattgcatttggtaaactgctgaactgtgggcagacctgcgttgctccggactatattctggtagagcgcagcgtaaaggatgaatttttgggttatctgaaaaaatggatcgtgaagatgtacggcgaaaatgcgacggaaaatggcgattatgtaaaaataatcaaccagaagcatttcgacagagtatgtggtttgatcgaccagaagaaagtggtattcggcggaaaatggaacgaagagaccatgcagatccagcccaccattatggataatgtagtggctggtgatgccattatatttccttcgttatgaatactaacgtattttcccttctcgttggcaagttgtttttacgcttcctattattgcgaataatttcatcccatattttttgttcaaatgcttcttgattcaaagccgttaactctgcatcttcaatattatcaagcgtcaaatataaccttaaataaaatggtgcacgaagtatatctgtcaatttcttatcacttggcaatacgaatccatgtgtaatagacagttcatacagtaaatccttactaataagattaacatgatatgattgtacacaaacttcatttagcaacaaattatgaaatgagtctttataggccgttctaatggtaagaattattttccaaccagcagaaataaacatttgaagcaaatcctcaaatgtttgctggttttctaaaacaaaatatttttcaactgcatcaatatatagaatacgattctcagtctcttcgtacacctttagtacttcatctattatgagcgttccatatgtcatcaaaaaatttctctcgtcagaaacatccatgtctgtacatctaaatgccaaaataaccgtatcctgaccgatactagccatactctttttaatgagtgcagattttcctgcaccagcctcaccatctacaactaaagcctgattctcagactgcaaaaaagaatttatattaaacacattattttccagaataatggttttatcattatacgacacttgtgtcccaatatgattaaaaatatcttctttatgctttttaaggttttcacaacattcctgaactgcagaatctgcttgaaagaaaacatttctacaaatagtaagtcttttatcctgcataagctgagcctcgatattacttaaacctctccactcaattgtaatccccagtaattgtgcagtattttcaatatttgtctgatatgccggttttacaatatcttttttggaacttggagaaaattcttgactaatataaaaataaagtgttgtaataccaggataagctcttgctgctcctttaactgcatcacttaattcattttctttgccagacatagaaacactatctgaataatattttgcttgaaatcctataagtttgtcccctacttgaatggggttcgtttcaatatacaagcgtgtgcgagggagattgtggataaagggatgatttatcaataagaaaaggtgtatggtggaaagcaagtctgaaaacaaaatgattaggcgttgtcagattcgaataacagacagaaaacctcggatgcccattttataagggtttccgaggtttctttatgcctgttggatctatttcttttgacggagtattttttatgcgttaataccgaaaaacttctccatatcctcttccacagtgccaattcctgcaatgccgaagttctcgatcaagacctttgcaacattcgggctgagaaatgccggaagtgtagggccaaggtggatattcttcacaccaagatataaaagagcaagaagaacgataactgctttttgctcgtaccatgcgatattatagataattggcagatcgttaatatcgtcaagcccaaagacctctttgagtttcaaggcgattacagcaagggaataggaatcattgcattgacctgcatccagaacacgtgggatgccattgatatcgcctaaaggcaacttgttatatttatattttgcacaaccggcagtaaggatgacagtgtccttcggcagagccttagcaaattctgtatagtagtcgcggctctttgctcgaccatcacagcccgccataaccacaaactttttgatagcaccgctttttacagcttctacaactttatctgccaaagccagaacctgtgcatgggcaaatccgccgatgatttcaccggtttcgatttcactcggagcgacacatttttttgcatgctcaataatcgcagaaaaatttttttgttcgccaatttctcccggaatatgtgtacatcccggatatcccgcagcgccggtagtgtaaagcctgtttttgtaactatccttaggaggaacaatgcagttggttgtcattagaataggaccgttaaaggattcaaattcttctttttgtttccaccaagcattcccataattaccaacaaagttaggatattttttgaaagcgggataataatgagctggcaacatctcggaatgcgtatacacatccactccagttccctgtgtctgttctaacagcatttccaaatcgcgcaggtcgtggccggataccagaatgccggggttctttctgacaccgatatttacctttgtaatttcggggtttccatagctgtctgtgttagccttatccagcattgccataccggatactccgtattttcctgtttccattgttagagcaatcagatcttctacactaaggttgtcattcagcgtggcagccagtgctttctgaagaaatgtgtcaacttcatcgttgtccttcaacagcacatttgcgtgcttcgagtaagcggaaagtcccttcaaaccgtaggtgattaactcgcgcagagagcgaatatcctcgttttcggtagaaagaacaccgacagttctggctttttcttcccagttttcagatccgttccattttgcggcttcaggcagaacagtcagattggtaacttgctttagcagaacttccttttcggtcagtgtagcacggattcttgattcaatgctctctttatcaaaatttgcgttggtaatggtagtgaacagattcagagtaatcaagtgattgattttggcagatacctgcttaccttcctgacgcaatgcagtcgtaatagccgaaattccttttgtgacatagaccaacagatcctgcatggccgctacatcaggtttctttccgcatacgccggacatggtgcagcccttgcacccggcggtttcctgacactgatagcaaaacattttttgttccataatatgcctcctaaaaactattaaaatttgaaataatgtggtttcttctcaatcaaaaaagcatatagacgcgtttgaattaatcttcccaggcgattgcagacacaggacacgagtcgatggcctcctgtacagcaccttgattttcagcgtttgctggttgatacgcttccgcctttccctgctcgttcatacggaaaacctcgtcgcagatccacagcaaagcccacagccaatgcagagatccttatctacttttgttgctttcataaaatcaccttcctttgtcaattttgcgtttgattaaaatacaactactaaaagcatcttgaacgcttcctgcccatataccgcatggggatggcctgctggcatgacaatagattctccttcgtgcagcagatattcaacgccatcaatcgtgatttttccgataccatccaagcaggtgacgaaggcgtccccacccgattcatgggtgctgatctcttcgccctttgcgaatgagaacagggtaatacttactgcctggttttgtgtcaaagttttgctgacaacctgcccctcctgataagaaatttgttctctcagcgtcagtacttctgattgagcaatgtttttcatttttttactcatagtatctctccttttattccaaaattttaccacccaacgaaatcgtaacaatctgccaaggaatgaattttccgcttgcctgcaacgcttttttggcagctaattccagtccgccgcagcagggaacttccatgcgtacaaccgtcacactttgaatgttgttgttttgaatgatctgcgtcagcttttcgctgtagtctatgctgtcaagctttggacagccgataatcgtaattttcccacgcatgaaatcctcgtgcattctggcataggcgtatgcactgcaatccgctgcaattaacaattttgcgccgtcaaaatatggtgcattagtcggtaccagtttgatttggcatggccattgtcccaactgtgattctgtctgtacccgggcagaaggagttgtttcttgtgaatgttgaatacgctgcattcgactgccggggcagcctgtatggggaacagcggcatgattgcttttcgcttttttcctcatattttcctgcacagctttttcatcataggcggcagcttctctctccacaaaggaaattgcacctgtcgggcaggttggcagacaatctcccaaaccatcacaataatcatctcgcagaagtgttgctttgccgtttaccatgccgattgcaccctcgtgacaagcttcggcacacgcaccacatccgttacatttttcttcatctatttggataattcttcgaatcattttataccatcctttctcttgtctttctgggcatagtatattataattaaaaataaaaatctgttgttataacaacgaaagggtaaaaaatatgaaattatccgatatgcagctattccgtggggtagaagaagatgacatctcctcgcttttaagctgtttgaatagtgtaaaacgcaattataaaaaaggagaagtaattctttcagaagggagtattatagagaatatcggcattgtactgtcaggcatggcaatgatatcttgtaacgaaatttgggggaataccagcattttaggaagtgttgcacctggttctgtatttgctgaggtatatgcctgtattccgggacagccgatgctggttacagtgtctgccgtggaagatacctctgtgttgtttatgaatgtgggacgtgttctgactacctgcacaaacgcctgcccttttcatacaaaccttgcacgaaatctactgactgtctgtgctcataaaagtctgcaactttcacaaaggattttgcacaccagttccaaatccatacgaggccgattgatgtcttatttttcagaatgcgcaaaacatgccggaagcaattcttttctgattccatataaccgccagcaattagcagattacttgaatgttgaccgcagtactatgtgcaacgagctttctaaaatgcagaaagatggcatgattgaatataaaaaaaatcgtattttgctcaaagactgagatttaaggaatggtatgaatttgaatagggattgattttttaagcaaaatcgcttatgatctgaaatagaatatagtgctattatccacagttacggagcaagtgttatcaacaccgataacaaaatgataacattagcctgtataggcaggataatatggataaatcaaataatcaaaagaactgtaaacacgacagagaataatctctaaacaaaattgattagtaattgtcgaatttgaataataaaccaaaccccagagtgccctatttttttattccgtgatgttaaaactcagaaatttccgctttttccgcataatttcttatatttcggtatggttgtattggccataaaatcatccaatttttctatgctgccattaaccatctcgcacgtactgatcgcatccgaaaaaacagctagaacaaaatccttcatatccggatccggcctgaaggtagaaataatatgaatgattgaatcgccaaaagctatcaaatcaagatatgctgatataggatatccgtacaactcttcactatctatattaattccatatttggagaaaatattttggttgttcttttttatatgttcgtttccatcatctattgattttttgagaagatactggcttgcttttgatagtggagagccaggaaccatatcaacaaagatatcgttaggaataatagaatttgtttttctctctttttcgtattcttcctgcctaatcatcacttctgttttatcggcaagagccttatcggaatccggatacaagtgagaataagtatcccatgccggctatatctttccccgaaccagcatggcagttaaaggcctggtgtgcgagctgccgcccgtggattctggctatcgtggagagatccatgccattatcagcaatgtcagcaaccaaattcaggaactcaccaaaggctcccgtgtagggcagctcgtaattgccccggttgttattgcagattttgtgacggatctgggtgcggaacgtggtacaggaggattcggcagcacagggcaataagaataccgtttgatatgcgcgcacagtttaagtgtgcgtttttcttacccaaaatctaaaaaaatgaaggaggctatatgcagatagaggaatttaaccaatatgtgaaagaccacatcaaagaataccttcccccggaatatgagactgcaaaggtttctatccaggaagttacaaaaagcaatgaccgtatgttgagcgggcttaccattcttcgagagggcgagaacttttcacctacggtctatctggaaccttttgcggagcaggtggcacaggggcgctccttggaagataccctgcgcgagattacaaagatccagaccgttcaccatgcacatgtaccggtgaacatttccacttttatggattatgctgaaacaggtggaacggagcgaactatccgcagatacctttatggaagggatcacggaaatgtgccgggaactggtaaaagaacatactgcaccggaggaacgatttgccaaactgttcccggacgctaaaggaaagcaggatgctgtcggcacctgtccccgctgtggtgcacctgtgtatgagggcaaaaagggctttttctgtgataacagggattgtgcctttgctctctggaaagacaataagttcttcacttccaagaagaaaaccataaccaaatccgttgcggttgctctattgaaatagggctgcatttccatatccgggctttacagcgaaaagactggcaaaacctatgacgcggtagtggtgctggatgacacgggtgacaagtatgtgaatttcaagctggaatttccagcagcaaaaggcaggcggaaatgagcggcccggcatcacgggaactgacacgatctgaacgggcagcgatccggcggctggtaaacaaatgtgccaactatgacagcacggataaaatctgccttccgctggactgcccttgctatatgttgaataaatccaaagcccagccgggatcattatggcacatggcagggaaatcaaaaacagccctcccaccaggagtagctacgctggaccattgatgctgcactggcagaaaagccgaaggattttgaagaatttttgcaaaagctggaggtggctggtattgaagtcaaccgggaacgaaagcatctgcggctccgcacttcactggaacaccgctatacccggtgcgataccttgaaaggcgattataccgagcaggccattcgggaacgaatcgcaggaaccaggaaggtcacacctcgccgtacctcttataagaaacccgcacaaaagatcggtatgctggtggatattgaagcggccctccgtgccggaaaaggtcctggttatgaacgttgggcgaaagtattcaatattaaacaactttttcaggcggtgctttatttgaaagagcatggtgatatgaattatacggagttaaaagaaaaatccgatagcaccaccgccaatttcaatgccgtgtctgcacagatcaaggagctggaaagtaagatgaatgccaatgcagaattgcaaaaacagatcgtgaactacgccaagacaagggcggtctatgtggaatatcgcaaggccgggtacagcaaaaagtttcggtcagcgcatgaggcggacatccttctgcaccaggcggcgaagaaatattttgacgagctggggatcacaaagctgccttctgtcaagggtttgcgggaagaatacgctgccctgttggagcagaagcggaaagcctactctgcttataagcaggacagagacgatatgaaagagcttcataatgtgcgggcaaatgtggagtatttactggaaattcgcacggaaccggagtcccagcgttctactgaaaaagaccggcattagctttcagtcagcgtttgttttcagcgttccaacggaacgcgtagccattgcccacggcaataatctcaggagtttggggatatgtcaccaacaagcatgaggcatgaaatccggggtacggatttcatacctcatacgacttctgtataagaaggcattgcttgcgaacttgaattagcttataaatccagcacttcttgcactgattcttcctctattacctgcataatagaatccatcattcctccgctgacctccaaatcgtcagaaagcaggagagccattgtttcacggtcttccggggtggcattttcagcaagtccagcctgaacgacctttaggacttcctgaataaatcgtttgcctttgtggaactcacttcccattacagtacctccgtccttataaatttcatcattgaaatgtgtctcatgttatttgcggattgcctttccaagtgcaatgagcaaatcaatctgttctccgggcagaacctttatcacatccataagttcggatgcctttgtcgggtcggatgattccagatcaaaaaattctttcggcgttatctcaaaataatcgcagatataaaagaaggtttccatagatggataattctttccaccttcaataccattgatatagttgggactttggccgatggacaggctcatatctctggcagaaacgcccttatttattcttagctgtgccagccttttgcagaaatcttctcgttccataggataaaccaccttcttgtattattatgaccaattttactatacaagaatcgaaaaaccgcccagccattctgttaatttgtattgacttaactagttgtcctgcgtagaataatatggaacagtcagactgactgtgcaagaacatgaaatgtgcttttccctccattgcaggtgcggcaatttgcaaaacttgggtacaatatgaaaagcaaagtgcaaaatcaggagggaaccgaaatgagcgaaagaaaattaacagagcaaaaaatcgaggcttttcaccaatatttgatccgggaagaaaaaagcacggccaccgtggagaaatacctccgggatgtccgtgcttttatggtttatgttggagaaaagagcgtcacaaaggatgtggttatggaatacaagaagcatttgcaggaagaaaactatgcggttcggtccatcaattccatgctggcgagcctgaacagcttccttatttatatagggtggtctgactgcaaagtaaaatccatgaagttacaaagatgcgtctactgtgcggaagaaaaagagctgaccaaggccgagtatgagcggcttctgaaagcagcggaaaagaatgagcagcttcgccttgtgatgcagaccatttgcagcaccgggattcgggtgtcggaactgaaattttttacggtggaggctgtgagccacggcgaagttgtcgtgaattgcaaagccaagatccggacgatcctgatccccggcaagctgagaaagctgctgttggactatgccagaaaacaaaaaatccgctccggtgtgatctttgtcacgcggaacggaaaaccgttggatagaaaaacaatattctaacaccaaaggttggaagtcgtgttgatgaattgttaacagaattctcccaaggagaaaacgaaaaagtaccagctctaagaaatgcattatctgtaccgttttgtgaattggaaaaatattcatcatatgttactgacaatactcgttttgctacacatcagggcgttaaggggttagagtttcccagagttatggttattatggatgatgcacaggccagaggttttttgtttagttacgagaagttgtttggtgcaaaagctcaaagcgatactggcgtaaaaaataagcgtaagggtaaggataccagcatcacgagaacggcacgtttcttttacgttgcctgcacgagagcaaagaagagtttggcggttgttgcttatacagaaaatatggaatcggttaaaaatacagcattatcaaacggttggttttcagaagatgagatttacatcctgtagaatcattatattctgcagagattttctactcgtttgattaagtcgaaatagtatagatattgttgccgataatatatgatggatgatcttttgaatttagaaataataatagggtaaatacatgattttatgggtggtacaatgccggaagatttaccgacaccagaacaaagtattcaacaggttgaaaaagaataacttgcccgattaaaggcgaaagcaagggcggggaaactaatgctggatgaataattgtagaccggcacggggactctgccagtgccggtaataaaagaaagtagttatgcgtacacgatttcagaaaataccagttctcttgctgaggcttggatgttattcatagcttgaagccacgtgagccaattagaagattttaattgttcagtaatgccctgttgttttgccatttgttttacgattaaaaccgtgcgatcatgggcggcttcatttatatcagcaaggtgctttgtcagagtaccagacaggattaagaccatatatataaaacggggtgatgctcttttatatatgatttgcggagagatccgtataagccaatgggacgagttttgttatcttctggtaattgcaaattggggtagtacatgccatcttcggcaagaatgtattcaatgttgttttcaataaatcttttttttatagagtacttccatagtctacttgtaagccgtcagaaagaactcactatgaggcatgaaaatctggcggcggtaaataagttcctgcgaggtgaataaaaatagtggctacattttggctacaaaaacattacggacgaagcggattgtgcggataattaatcataaaacacgcataaagcgaattaataatacattttatgagcattcgcacgaatgtaaaagacgagtttgaataagtgctggttttccagcacgtaactgttgcattaaatgtgtttctaaatgatcatcaccaaatccatatccaataataatataccgctgcgccttgtcaatttcctcattagcacgtgctcgatgtatatcgaacggaacactatacccttcgcgatatttatttaatccaggagtaattattaaactatcctctattgaataatcaggcaatgaatatggaatactattaattaaatgccaactcaaacaaccatgtggtttcaaaataatcactcttggagaatactgcagttttttcccttttccattcgttctttgcaccccaatacaagaggcatacttactttgattgggtttgaaacgggctatatactttccaacaaaaagtgtatctgccattatttcattagtttcacatgcgtactcaagcaatcgatcataatttgttgtaattactgtcattccttcatttcttatattaaaccgttgtaaatattccgaaaatctaagttgttttccagtttttacaatatctgtcaaaagccttttatccgcttcaccaatatatattgccgttactttccgaatacactcttcaacatatgaacttggcttagtattgtgtaaagcttcttctaatccaactccttttgccaaatcgttttcaatattattccagtttttaatatcacctgtcgcagacaacaatcctggaatttccatttgcaatttcttagctagttcgcccattcctggaattccttctgctaatgagagtcctgatccaactattgtaactgtaccctcttgaaaaaaatcttgtattatcttttttatcgtatcaatatccattatttatccttccgtattattcatgaaaacaattttctatattcttccggcaaatactttgccaattcctccaccaactcataaaccttcgttcccggtgctatctctgtcggtgttttcccctgtccctcttttataattcgcttcgcatatcgtatcgctaatttaggacttccatactccattaacaattcaaaaatgttatacatgtttttctcatacttaccaatcccaagttcttgaaatttctcattaaggaacttcttatactcagatctgtgattgtttgaagtataatatgcaaaatgcagaagaaaccaaaactctatgcactcgttactccatgccgcatgatattgtaactctggattctgtttattcaatttctcagcacgttcaaccacgccattaaaatgctgcgctggaaaactatctttatcatacacgcaccatatctgccctttttgaagtcggttctttttcacatattcttctgccattccgattacacgcatggtctccgcctgacaaggctctatttcaatcaaaaccatgtctttgtaaatcggattttcttcaatccattttttgaacccttggaaataattcggttccgtttcttgaccttcacaaaaaatgtaatatctgtattttttcatttccaaatgctcttggcggcgcttctttctccacgcttctgttctggttttcctaggcattaaccttcccccaatctataattcttctgaggtatggatctgcaccatacttaccttcaagatactgtttatcaaatttggcatctttacgaacagactcgcccttctcatttttaaactctacaagagaatacaattgagaattctgtgcatttcctttcgccacaaaccagatttcatccctgcgaaatacctcactattcattgtagacaaatcatgagatgtaaaaatcagctgtgcctttttcttattgatactcatgtcattgaacatcataattatatgacgtaataacaccggatggatttttgcatctagttcatcaattaccagtgttgctcctgataataagctatcagcaataaatggcattaacccaaacaatttcttcgtaccgctggattcatcaaacaaatttagttctgcttcatatccctctaccatgtgttttgtgtacacatcaattcgatcattttcatctttcacaactcggaaatccacaatatccaaatccatttcctgaatcatatctagcattaactgctttacatcctctgaatttgatactgccatacggagttcttcaatcggattcccatagtttagaaaatcaatgccgtattcaaaccattctaaaacgtcttttaccacctcatttttcttataggtaattcctaaataagataataatggtaatgtttcagaaagttcgtcactaatctttaattttgcaaacacaccctttaatattgtttcctctgcatttcgctcaaaaagagctgaacgtcttcccgtctccaatttcacacgatctaggcattcatatacaacaatctctcttttcacatgaagaatatatctatattctgccagttctgttcggaagaaaacttcaaattctgtcggttcatttttcatttcttccgaaaacgcaaagggctcaatcagtaattttttctgaagaaaaacacgttcctcgttatctcctgttgcatacaacgggcgtaacacttttgctgccacagtatgcaatgcttccaagacatttgattttccaccaccgtttggaccatatattgcagaaaccggcaaaaactgctccccatttttatccattatcactttatcttcatgctccgaaatagccgccgcctgcatatcaaacgtcatctcatctcgtatgctcttataattcttaactgtaaattgacataacataccgttacctccatttcagattttatcttctttactctttattatactccatttttcacttttgtaaacaatatatgagtttttctctcatatattgttttgaaattttattttttctatttttcacagttgaaaacaaactattgatggcatacatttcgcaacatctgagacaattcttgagttccatctcgaataaaccttgaatatgcttggataatttattttccctcctgcttgtccccttccgcactcttctcagctacctcctgcataactcgttcaactttcttcgcattcacctcaataaatacttttaatatgtaatcggcggtaacttccgcagtattcggattatgaaaacgataattcagtttttgtttcttcatagcggtgctcccacctcccttttctctttgtccattactatgaaaatacctattaaaatagaccttaactatcatctattcgtaattactctgacattggcggctggcaaaggtatctataaagactgccaataccaaagtagttttttgccaatgtcatcttttattctgtgattaacgcaactgtttttcttccctgacaccagtcgtagctcaatctgttttccaactgttttcttgcatctcttcctgttctggaagaaatcccataggctagtagttctgcctctaattcttctaaacacattacttttcgtttggttaataactccaggatcaacttctgtgccttttccagtttcgtttcctttttcgttcctgctttccccatcagcagatcttcaatggatatatcgtattctcctaaccattttaagcctccttctcctaaagaaaacgctaccggattttccttcttagcaagagaatccttttgctgatatactactcggatatcctgttccttctctttttccaccttttctacaaataagatgcttcgtactgccgctgcaatatcaatggatcccagggaacggtaatcgctctgacttcccgatgacttattcaaatgtccaatgagaacaatggcacatccagttctctctgcaatcgtactgagatgccggaataagggacggatctcatttgcccggttcatatccacattggatcccagataagcctgtatgggatccatgatcatgagtcgtacattgttctggcggatggctttttcaatccgatcgtccgtcatagaaagctgtttttcttcttcattgatgaatcgcacccttgtcatatctgcaccacatttcgctaatctaggcttaatggtatctgctatcccatcctctgctgtttgatacaacacattaaagggttctatgggaagtgcattgggaagttcttttccattcgtacagtatgcggcgattgccattgcaagccacgtttttccttttcccggattcccctgaatcaaagtaacctttccaaagggaatgaatggataccatagccactggaccaccgtttcctcaacttccgacatcttcatgaccggaactggtttttccctggcatctctccaacacatctgctttgccatattttctactggaacttctgctaccagacattcattccagtctttcttcaccggttctaatcggtacacactcagttcctccggaataagagaaacaaactgcctgcatctctcatttccaggctcatcattatccagacacaagtagatggaatggatatgaggatattctgtatacatccgtttcattgctttttcactcaatcctcccagggaaatataactatgcatttcccattcttccggaactgcggtgatataagacaaaagatcaattggagattcaaacacaaatagtttttcatccgttcctatatggccaaatccataggctttttctgaacctcttgcttccccacgatatcggttctcatcggttccccgcatagctgtatatctgggattctgttctttgtctcttccaacgaacaccacattgtgatagtttttactttcataaatatccccctttgcaatcatctgatctaccagctgttccgatagtttcctctgctcaatcagatacttccttgcaatctcacagctttcatttctttctggcagttccaatccaggcaaggggatggggcagaccttctgtctgcctgcatcttccttgcccgttcttctgttggtttctccagctccctcttctcctaataattctttaactgcctctgcaaaagaaaaaccgtagaattctttcataaagtcaatggcatgaccacctttattctgactaaaacgataccattcgttcttgttgatcatcacactgtcatgtcgtaaccaccggtattcttttccacatcgtttgaactgttctcctctcccagaaagaaaaacatataaatcagtatcatctgctctttgaatctgttctcttgtatattcttccatcttctaaaattcctcctataattccattccatgatgtttcttctttcgtttcatggttctcactgcttcttttgtttctgtggattgctcccgcttgtttgtttctggaagagaaacctcttcgtcctcctctgccatcaaaacttccacatgatttttgactttctcatactttcgtaacatggcatggatccgtttatcttcctttcgtaaagcagcaatctcttccgataaacgatctgcttctcgcttccattttccttctggtatttttccattcgcatccagattttcttttaagattctttccgaacgataatatccactaagttccttcttatgttcctctttgaatttttccctgccaaaatatttgttctttaattccagataaacaggtctcgtttcaaaatactctttcatcgcataaaggttgctgttgacacttcgcagagcagacagttgttgattcaaccgctgacttacctcttttagctgagtatctaattcctggattttctccgtcagccgttctggggtcctcacctcctgctcttccagaaagcggatcgtctctgcaaattgtttcagatttatattcttcgccttttgtgttccataagcgtaggattctgcgactgcatttctcttgtcataatagtttctcagataatccgctaaagttggctgatgtaagaacagcatccgttctatcaactggctttgtcgaagcaaagaccattgaagaaggttctttgcccgttctttcatatcatttaaggctcggatgagtcggtttaaacttcccagtgcggttgaaattcctcttgcttccattgcctgtacattcggtccttcatgcaccatcgggatcttatcaatcccccgttcctcataagacctggcatcgactctttctgtaagtcctttttcttcatacagttcgttacacatcttcgcccaggcacttctcaattcttccaaggtttctttcctgctccaatccgttgtatgtaccgcccgaaataccggttgtcctttctgattcaaaaccggctgtccatccggtgtcagtactggaacctttttttgcttttgtccccaggtaccatcttcctgtaaagggcggatgggcaccatgatgtgcatatgaggattggggattttatcctttgccttcttcggattatggatcgccagatctgcgatcatccctcttgcgactaactgttcttctacaaatcttcttgcaagctcaatattttcttccatagaaaactcattcatcaaggcaatatcaaagctgtgtgccagctgtgctttcttattcccttcgatccattccacctcattccaaagggtctccctgtctttgaatctctccggagcctgtttgggaagatggatctccgctaataccacaccgccttttctcgtataatcacttacttctccataatacgtacattccagttttgtaccggctcgataagcagcactggcaatggcagactgcccttttcctctggataattgattcagatgaaagtgataacatcccatcttactcatctccctgtggcaattcacctcgttgcattgcctttaaaagtgtttcctcttctgcgaattctcgttcctttgcttctgccgcttccgcccgtccacgaaccatttcatgaacgacatcacaaaacttacaagcgggattatgaagaagttcatccatcaactgataaaattctgcctcggtcaaatatttggtatctttacagattgcttctatggctgctcctttctgaatcaacagatgggttcgtgcctttcgttttttctttttctgtgtatctagatagttcaaggatctctggattctatgctctgcctgttccttctcaagctttgcctgtttcaatgcagcttctgttttttcaatctcaagaagtgcttcctgtgtatattcctgaaatgttttcttcttcgccatatagttcttttcctcctttttcaattcttcctttttctctgttacgggataggcatttctgccggaaggggaacccttcttcggatggatcatccgcaaacactttcggaattccccttcagaaagatgcaaactccgtaggacgcacataccttgtaaggtatataagtgcgctcttctgctttcagcatccgagtttttcttactcaaacggaagttcttctccgtctggaagatgcataaatccatctggatcggtatcttctttcttttctgatcctgacagtttcttcccttctgccaaataatgttcttctatgatcacgttagtggcataaactttattcccctcctgattcacatagcttccagtctggatccgtccgctcactaaaatcttcaaaccttttttcagatatttttctgcaaactcagcattcttcccaaagctgacgcaagaaataaaatctgtttctgcctttccatcctttcgatatcgtctgtctactgccagcgtgtatcttgccattgcagtactgttttcatcctggagacatttcacctccggattttttgtcagtcttcccattaagattgttttgttcatgtagtttctcctttctcttttcgttttttctttgttcttgaatcaggcccgattcttttaaggcaactataatttgttcctcatatatcagaacgtagagagggatttttacaaataaaaaatgaattttatttttttgtcctcatataacgaaaggctcagaggggaaaatacagggtgtaaaaggaaattttttatttttctgatcgagtaggaggcggtgattaaccgccgtcctctcacaccaccgtgcgtaccgttcggtacacggcggtttcaatagttgacgtgcagagactgatacgctgtggctatatcatagtagccccagtttatcagtctttctttcgttaatgctcttttgaccacacctgtattagacatcctccaataggattttctactgtatgccccttcacaggcaacccactctggcattcccagacccattagttttcttttccgggtctttggcagtttccactgcttccagatacacatccttattcggcggtacagccatccgttcatgctttcgatgttgttcttcatgtccgctattccatagtaattcagccatcctcgcatataaacttttatcctttccatagctcggatgatactcccacatttgctccgggaagtgagctgtcgcagtttctccttggctttcttccatgactttccatggacacggatataaattccttttccgttcttcccaaaacaaaagccaaggaacttaaattttcggattgcgaacacgctgactgtcatgctcttttcccggttcacttttagctttaatgtttcttccagatatttcgtactgctctccaacagtcgttccgccgcccgttcactcttcgccaacagtacgatatcatctgcatagcgaatacacggtacgccccgtctgtgaaactcccagtcgaattcattcagatacacatttgctaagagtggggatagattccctccctgcggggagccttcttctgtctctgtttcaacaccgttttccatcactccgcctttcaggtatcgctttaccatctgtatgaccctctcgtcttttacctgctttctcagcagatttaagaggattgtgtggttcagcgtgtcgaagtaccttgacaagtcgaggacgactgcccttatgtagccttgttcgatgtactcttttatcctgtaaatggcgtcttttgcccctcttcccggacgatagccaaagctgtcatccgaaaacagcggctcatagattggcataagctgttggagcattgcctgttgaatgatgcggtcgatgacggtcgggatgccgagtttccgctttcctccgtctggcttcgggatttccactcgtctgacaggagtaggggtatattttccccttcgtattctctctgtcagtttctggttatgctcctttagccacggcagtgccgcttcaatggtcattccatctactcccggcgctcccttgtttgcctttactcttttgtaagcccggttcaggttgtccctgtccagtatcttacctaagaggtccggctctgcactgtccctttccttccatatccggttgaatgagcggtgcgctctcacataccctttgcgttccgcgctatctctttgcgagcagctttctatgttttctgtacccatctgcccattccccctttccctgtcgtactaaagactcctattgattcagcccttcgccgaaaaaaaaaaaacttccagctactgtggcctctgctgacttctgtacgttcagcgttaccttccggtaacggttactcttttcagagcgttccgtacagacctccctgggtaccacacgtttctttccctccatccatctgccgcatttactgcacatgattccgtgtagctatcgggcttcatcttgtgtggcagacttaccctcatgtacagccttatatacgatttctttccgtcagaccggaggtttgcccgtaggttagttggttccccacatccggcttccttcagattccacctcacgatggacacccttgccttcggctatatccttcccgctaccgggcggattcgggactttcacccgttagaaacgtgcgccgccaggcgcaccacaaaaatacccctatgacttcaaaatcgaaatcataggagtatttaattcaacctactcagtggggtgttttatattttgttttacacatgtcattacagtgtttttcagttcgacaagctgaaattttcggatccttatacctctgcacactttaaaagtaatatccctttcattactaatagcagaaatactacagccactgcataggattctctggttattgcaaatattaacactaataaggtactaatcgacattgatacctttgttgccaccttattatatctttgcatatctaattttatcagtatcaattttataaatccgatcacaacaagaaaaacaatcataacccagtacaatgaacggttcaatgatgtagtctgaatgtatgcaaatagatttactgaatagacaaatccatccaacacatttggataaagcggtaaaacaattaaaacaattgcgaatacatccaataacccaaataataaatcacacattcctcttagatttgctctgttttccttttctgcaatagaaagcagcttgtccgtcgataacaactcatcaatggttaccgaaaaataatttgatatttcctttaatgaatcaatacttggatatcctcttcccgtttcccttaattaaagatattgttgggtaaaaaaagaaaggtcagtcgattttgccgatgaagcggtagtagatttctacttcctgctcacgacttccgtcctcgcccttgacagcttcgtggacggttattttttcaattagagtgttcagaagttcggcggtcagctccacagggttgacatactgtttcattagggcaatccacttttcagcatccgctgcggtctgtacggcggcttccatcatttcgtgaagctgtcttatttttgtttcaagctccttttgctcgttctggtacttctcggacagcatattgaaattatactcggttatgcgtccggcagaccagtcctcatacattttagcaaacagcccgtcaacctcggctttacgcttttccgcctttttcagctccgcagcctgctttttcttcgcagagtttctttctctgtcgctggcattgagcagccgtttcagcagcttgtcctcgtctttctgtgccaacatagaccagtattgcagtcttgcaagcacataggcatacagtacatcataacggatatagtgcatggaacactggcgtaatccctgtccgttcttgctgcaatggtagtacccgtatgggttcttattctgcttgttttccccataggctaaagaccatccgcagtctgcacattttatcaatcctgcgaaaatctgtgttgtaccatttctgcgtttcctgcgtctgcttgcaatcagctcctgaactttttggaacacttcttcggaaatgatggcttcgtgggtattttccacacgataccattcttcctgcggcttccgcacttttttcttgttcttgaatgaaatgttgctctgcttgttgtgaacgctgtgaccgatgtaagtttcctctttcaaaatgctcttgacctgtgcaatcatccacgcataggctttttctgcgggcgcaccggcgtagatattggcgaaagtcccatatctttcatagttcagccagccgggggtaggtactttttcttccaccagaatccgtgtaatgctggcggcacccctcccgtgtacggcaaggtcaaaaatcttttctacaatccagcgtgtttccgggtcgatcagaagatgaccttttttgtccgggtcttttacatagcccagcggtgcataggctccatagtgtgcgccattggcaaatcttgtgtgcatggcagccttgacctttttgctggtctgtcgggcgtgcatttcattcaggatgtttaagaacggtgcaagctcgctttctccgttgatggtgtccacattgtcattgatggcaatgtagcgtactcccttgctggggaaatagattttcgtgtactgaccggtcaggatatagtttcctcccagacgggataagtcctttgtgacaacgcagttgattttcccgtcctcgatgtcatcaatcatcctttggaaacttggacgctcgaaatttgtcccactccatccgtcgtcaatgtactcgtctacaacggtcagcccatgctctgcggcatactgcctaagatccgcaatcgaatccgaatgccagtaccggcggacgaacataattctgttttccttatccaaagtttcaagaaaacggtcaatacttcttgcaacctcgcctgcgttaaattcattgttatcgggcacactataacaaactgatcttccacttttcaggcaaaataaaagaggtcttggcataaaggaatctgacgtattttccatcagattgttttatcctgagacctcttgtgttatcatatggttttgtaaccatgaaattaagaaagcagaaacctcccctaccaaagtttagtttctgccttcacctaaacatagctctcgctacattcatacatacctatgataacagttaaaacagaaaactacaaccttatttctcaggatttttacaataaaacaatggattcccttgatctgaaccttatttcatgtacctgtggacactccggctgtctcatccgtcatggctcttataaacgcagcatccagcttgctgacaggatcctatccctttccgttgtccgtgtgtactgcaaaatctgcggacatacccatgcattactactttcatccatggtcccgtattcccagatccccctggctctgcacgtccgtctgattcaggcttatgaacatgaaaccggattccggaacatactggaagaacaatacctcgtggatgaaaacaacctgaaatccatcatccggaactaccgcttacactggaagcagcggctgctctccatgaggcttcacctccccgatatccccagcctgatttcaggatgcttttccctcttttccagacagttcatgcagattaaatcaacctccaataaactttttatcctgccaacataaccttacacgacaggtctggttttatcccttatcctttagaaaaaggaggcagatgaaatctatgaaacaagaaaaacaacaggaaatcgcactaatgcgctatggcgccatcgcaccgatgattgcaggacttgatgaacgttatccaagcaagactgctttttacacagaaatctctgcaaaaggcctgatgggacccgacgggaagctccatcattatgctcccgccaccattgaaaagtggtatctagactatcagaaccatggttttgaaggtctcgtcccgaaagggcggtcagatgccggcatgagtcgcaagcttgatgaagaacttcaggagaggatccggtatttcaagaccaactacccccgcatgtctgcagccgctatttacaggcagctgaaatccgatggctccgtaataaacggacaggtatccgaatccaccgtcagccgttttgtgaaccggcttcagttagaacttcggcagaccccgaacagggatatgcgccgctatgaacgcccccatatcaatgaagtctggtgcggggacagcagcgtcggtccccgccttacagattcggatggcaaaaaacaccgggtctatatcattgccctgattgatgatgccagccgcttcattaccggaattgatgtgttctatcatgataactttatcaacctgatgtcggttatgaaatcagccatagcaaagtatgggcgcccaaaagttttcaactttgacaatggtaaatcttacaaaaacaggcagatggaactccttgccgcaagaatcggtacaacactcagttactgccagccatacactcccaccggaaaagccaagattgaacgctggttccggacgatgaaggatcagtggatggcagcccttgatatgcgggatttccattcactggaagaactaaggggaagtctgtacgcttttgtccaacaatacaaccaatctccccattcttccctccgtggacggtccccacaggaccgtttcttttcggaatcggagcagatccgcagactttctgaggaagacatccgtcaaaatttccttctggagcttgaacgccgggtatctgctgacagtgtaatcgtcatcgaccagattgaatacgaagttgattatcgttttgcacggcagcgtatccgcctgcgctattctccgaatatgaaagaaatcttcattgtggaagctgacgggacgctgacacccatccggcttctcaataaaaccgaaaacgcattgataaaaagagaaaaagtacgcttatgcaaaggagacgaatgattatggattacactgcaagatacggattggagttcaatcctttcctaaagaactcaaaggaagtcctcgtagaaacacaggaatacaaggaggttctgttccgcctgaactacctgcttaccacaaaaggcttcggtctcctgaccggaagcgccggaagaggaaagaccaccgccgtcaggaactgggcttcaggactgaacacttccctttataaagtggtttactccagtctttctaccctgactgtaaatgatttttaccggaatcttgccgctgaacttggagcccagcctgcattccgcaagaccgataacttcaagatcatccaggatgaaatcaaccgtctcgtacttgagaaacgacagacgcctgtcatcatcatagatgaagcgaactatatcggaaacgctgtactcaatgatttaaaaatgctgttcaactttgaaatggattccaaagaccgggctgttgttcttctttccggtctgccacagctcaacagcaccctgcgtctaagcatccacgaacctttccgccagagaattgtcatgaattataacctggaaggcatgacaaaagcagaagggcattcctatgttgctgccaaactgaatggcgccggatgcacacaaacggtattcgaagacaatgcactggaagcaatcctcaatgcagcgaatggaaccccacgtatgatcaacaaactgtgtaatgcaagtctgttggttggaaacagctcaaatttaaatatcataaccgccgatgccgtcatgcaggcgatcaatgactgtgaactgggatagctttagaaaccatcatgtaagataatctacatgatggttttttctcataaaataacgtgcctgaagcgtccaaaaatatatgcttcattccatcgttaggtgctccgaaagacccgttttaatctgacggaaaaggcagcgtttaatttgccgaataacatttagatatacgagcagttgcctgattgccatttcacagctcttgctcggtctgaaaccataactccactctgaaaacaaaggctcacatatgggacttatcacctgtacgatgccttgttgtattaccctgtccattaccgtagggattccgagttttctcattccaccgtttggcttaggtatctccactctcctgacaggttgtggtttgtacttcctgctcctgatttgatttctgatactttcccaattctctttgatatgatcgccaagttcttcgactgatacaccgtctactcctcctgcgcctttattggcacagactctcttgtatgcagtgttcatgttgtctttggacagtatcttttccaacagttctgacattgccttgtgtgctttctcctttccgttcccatggattcgccctaagttgtgcagtacctgctcatttacgttttgcccttcctgctgtcaggtattccatggggcatacatttgattacacggttacattgttcagcccttcagcaactcccatttcagggctttacctactatggcttctgctgacttctcacagttcgttgttactacggcatttccccgcctgtgagacctcacgggataagcctgccaatctttcctcgtctacctgcctgatttacacacatgggttacggttgcctttcggacttcactgtctcgcgccagcttatccaccatgtgtgccttatatcagatttctgttcgtcaggctacgatttcgctatcccttcttctcgcttgcaccttacgatgtagaccttgggagtcgctatggggttcgtcggcaactacgccccttgtggactttcaccacagactgacggcatgcccgtcatacgcgaaaggggctgtcgggaaatagatagttccaaaaaggggcagatttgactcgcatgagtcaaatctgcccctgaagcttttccgtaaagagagaaaaagatggctaacgacaaccatcttctctccattccatgttataatggaactatgctaaaacaagattattataacgaattttttgaattagggcaacagaaaatgaacttcagtttcttcgaattgtgtttacctgacgacgatccagtctataccctgaaaaaagtgatggaggatttagatttttctggcttgttagccaattgttcagataagggaagaaccgggtttaatccaattatgatgtatgctgtcgttacttacgcaaacatgcgtggggtaagggctgttgaccgtattgtggaattatgtgaaagagaccttgcgtttatctggcttaccaaaggacagaaaccaaaaagagatgcattctatgaattcaagaataaaaaactaactgctgatgtattagatgaattaaactatcagtttcttcaccgtctgcaaaaagaaggactgattaccctaaagtcgctttttattgatgggaccaaaatagaagcgaatgcaaaccgttatacatttgtctggagaggaacactcaattatcaccttgcaggcttgttagatacgattgatttactgtatgagaaatataatgtcctgattgatgaaaatgagtatagcatcaaatatgatattccccatgcacatatgtttgtgatcgaagggatggataaagtaagggatatcattgaaaagaaccggaaaaggaaactggcaaaacataaaaagttgtcaaataatacaatcatcgaaattgacaattgttctccgttggagattctgaaactccagaaaaatctgcttcagattgcagagcaggaacagatcacgtttgtttatggaaagggaaagagaaaaccggaaatccagcagctatatgaggaactggaagcctgcggtgaacgcctgatgggatacaaagaatgctttgagatcatgggaagagacaggaacagttattccaaaacagatttagaagctacatttatgagaatgaaagaagaccatatgctaaatggacaattaaaagcagcatataacattcagatagcagtagagaattatttcattgttcaggcatatgtaagtaatgaccggacagattataatacattgatccctgtgttagaaaagcacaaaaacgcatttggagaaattttggaagaagtaactgccgacagtggttattgcagtgaaaagaatcttctgtacttaaaggaccataaaatcaccagttatatcaaactgcaggatcatgaaaaacggaaaacacgtgcgtacacagaaaatattggaaagtattacaacatgaaaacgcagatatttgaggatgaactttattacgtctgtcatgatggaagggagcttcatcatatcaggactgagaaaaaagaacaggctggttatacacaaacatttgaggtgtatggatgcgcagattgtagtggctgtgaacataaagcaaaatgtctctataaatatgatgctgagaaagatgcagagaaaaataaggtcatgaaagttaacggacaatgggaagctttgaaagaagaatcccatgcaaacatccagagtgagaaggggattttgaaccggcagatccgttccattcagacagaaggacattttggagatatcaaagaaaatgacggttttcgacgtttcaattaccggacagcagaaaaagtatataaagaattcatgctgtatgcgattggaagaaatataaataaataccatcgttttcttcatgatgagatcaagaaatttgagggaaaaaccgaagaaaaggctgcttagaaaaagagtgctttcaaaaatgcagtcaagggatttttgtgtcctaaaatacatacggaaaagaaagaatacgaatctcccgaagaagttcaagtattaaaaatactgatttctacgggagattcgtattttaagattcagagtctaaaagtcggtattaaccgacagcccctttgcttaccctctatcttttatcagcaacaattttccttccaaaacagtaacctttgctcttctgcccgggagcacttcattgctgattccatactggtattcacaggtaatctctgcattttcaagtggatacttggcattctctatcgtgatgcccttggcagtgccagtaacattcaaaagtgaaaagaacgcataggaatcctcaatataagcaggcttatttgaaatgatctccatttcagaataatcgtcaataatgattcctttcttaccaagcgaatccaggtagagcaaaatcgacacattgccaagtgtgtggtcgagccttgctcctacaacaccgatcagcagaaaatcatcaaaaccacgtttcagagcttccttgactgcaaaaacggtatccgtatcatccttctcgcagggaagtacaatggtctcaatatcaaaatgtggattatcgtgggagtcaaaatctcccacgataagtccgggtattacctgaagggcatccatatgtttcagtccgctgtcacagaagataatgtaatcatcctcacgaagacagtttctgatatatgaatagttgtttatgtcagcaccaccgacaatcacacatcgtttcattttctcaccttacagaatatcaatgtactctccactcaacgccttgttcatacttctgactgcacagaatttgccacacatcgagcagctgtcctcgtgttcaggagcacggctgtcacggatggctttcgcagtttcaggatcaatggagcattcccactgcttttcccaatcaaaagttcttctggcatctgccattgcatcgtcaatgtctcttgcgtgaggaaccttctttgcaatatccgcagcgtgagctgcaatgcgcgatgcaataataccttgctttacatcctctacattcggcagagcaagatgttcagcgggcgttacatagcaaaggaaagcagcaccgcttgctgcagcaatcgctccaccgatagctgaagtgatgtgatcataaccgggtgcaatatccgtaacaataggaccgagcacatagaacggcgcacccatacagatggtctgctgcatcttcatattggcttcaatctgatccatcggtatatgtccgggaccttccaccataacctgaacatctttttcccatgcacgcttggtcagctcgccaagacgaaccaactcttcaatctgacatacatcacttccgtcggcaagacaaccgggacggcaggcgtcaccaagcgaaatggtcacatcatactcacggcagatatccaggatctcgtcaaagtattcgtaaaagggattttcttcgcccgtcatactcatccaagcaaaaaccagggagccgccgcgggaaacaatattcatttttctcttgtgctttttgatctgctcaatggtcttacgggtaataccgcagtgaagggttacaaaatcaacaccatcttctgcgtgaagacgaaccacatcaatgaaatcttttgctgtaagagttgcaaggtctctctgataatgaatcacactgtcataaactggaacagtaccgatcattgcgggacactcacttgtgagctttctgcggaaaggctgcgtgttaccatgggaagaaaggtccataatggcttcagcacccatacctacggctgccataaccttttgcatttcgatatcgtaatctttacagtcacgggaaacaccgagattaacattgattttagtgcggagcatggagcctacaccgtttggatcaatgcaggtgtggttcttgtttgcacagatagcaacctgtccttttgcaacaagttctctgatttcttcttctgttctgtattccttctttgcaaccgccttcatttcaggtgtaataatgccttgtcttgcggcgtccatttgtgttgtgtaatttctcattgttttgattcctttcaagcaattttatttggtaaactcactatttagatgaaaagcgtgattcataggtcctgagccttgccctaagtcaagcatatcggaaagtgcgcccgaaatataattcttggctctctgtacggaggtttcgagatcatagccctttgcaagattcgatgctatggctgatgacagcgtacaccccgtcccatgggtgtttggattatcgattcgtttgccatagaaccatttgaaatttccatttgcgtatagcagatcatttgcatcatggatgttatgaccgcccttgagaagcacggcacatccgtatgtatcgccgattttctttgccgcttttatcatatcttccttatcagaaacagccattcccgaaagaatttccgcttccggaatattgggcgtgactacatcggcaatggggagtagttcatccatcaacgtagagaccgcatccgtcttcataagtgatgaaccgctggtagccaccatcacaggatctactacaatactctttgccttataaatcttcagtctgtcggcgataaccttgataagctccgccgaagataccataccgatcttgactgcatcagggaatatgtcctcaaatatcgcatcaagttgatgctttaaaaattcaggtgtggactcctgaatcgctcttacgccggtcgtgttctgtgctgtcagtgctgtaatcgcactcatggcataaacaccattcatcgtcattgttttcaaatctgcttgaataccggcgcctccactgcagtcgcttcctgcaatggtcaatgctgttttcattttcatagaaatactcctttcgtttttcagcatcgttttgtatagcggcataaggtggtgcccccaatctgccgcttatttcacttaaatcagagcaagctcatgtgctcttgctttcagttcttctgtcgccatctttggatcatctgctttcataatggcagataccacgcaaattccggcaataggaattccggtgagaacatcaatgttacctttattgagtccgccaatggcattcgcaggaatgggtaccgcattacaaatatcacgaagggtatccgtagatgtcagaaccgtcttcaccttggttgtggtgggatagattgcacctacaccaagatagtcagcaccctgctcgtaggcttcctttgcccaaggaacggtttttgcggttgcgcctacgatcttatcgtcacccatcaagcgtcttgcggttgcaacaggcatatcctcggcccccacgtgaaccccctcggcatccatagcaagagctacatctacacggtcatcaataatcagcggcacattgtaacgcttggcaatggcgtgtaccttctcggcaagttcgatatactcccgtgtgcttctgtttttctcacggagctgaagaagggttacaccgcctttcagagcctgctccacacggcagagaaattcttcctcggtgtagttcgtgctgtcagtgataaaatataaacttggatcaaactttttcattctctttccctcacacatacagatagtcattcagaaccggctgcagaccttcctctgcaatgtccctatacatcttgtcaagactgcggttatcgtcaatctcaaactgctcgtcgccctgtacttcatccgtttcttttcctgtatatttactttcgtgatcaccaataccggtggaaacacccgcagaaaccttcgttgccgcaatcttcacaataccgtttctaaactcagcactctcacgggaagatacggtaatacctacatacggcaggaagatacggtatgcacaaagcacctgacaaagctgtttttcgtgaacatccaaagggttgatcttgtcgttattgatgatcggtctgagtcttggacaggacaacgacatttcagcgtgaggatattttctctgcaaatagtaaacgtgcaatgcacttgcgagagcatccttacggaagtcagagagtccaagcagagccgaaaatgcaacccctctcataccaccacgaagcgcacgttcctgggcatcgaagcggtaaggccatacacgcttgtgaccgagcagatgaagctgctcatatcgatccgcatcgtaggtttcctgaaacaccgttacgtagtctgcaccgcattcgtgaaggtacttgtattcatcggtattgacaggatagatttcaagtcctaccatacggaaatactttcttgccagcttgcaggcttcaccgatatattccacgttgctctggcctctgctctcaccggtaaggattaggatttcctccataccgctgtcggcgatgaccttcatctctttttcaatctgctccatactgagcttcatgcggttgatatggttgtaacagttaaaaccacaatagacacagtaattctcgcagtagttggctatgtacaggggagtgaacagatacacggtattaccaaaatgcttacttgtttccagtcttgcacgctgcgccatctgttcaaggaacggttccgctgctggagaaaggagtgccttgaaatcttctatcgtacaggtatcgtgttccaaagctgctttcacatcggctgcagtatattttgaatagtcgtaggagttcatctgcgccattacacttgcacacacatccgactcaatcacttccatccccggcagatattccatgtggcttttacgtgaggacggattgttttccagccgatgcttttttgcaagtgcttctggagacagatgctccgaatccacaaaaaattgattatccataggccacctcttaatcacgaaggaaaccggtcagcggatcggaggcggatgcaccacgggtcagcactctgccaaggcccgcaaggtatgccttacgaccggcttcaatggcattcttgaaagcagaagccatcataggaagatctcctgcggttgcaagtgcggtgttcgccataatagcggcggcgcccatttccattgcttcgcaagcttgggacggtcttccgataccggcatctacaatgataggcaggtcaatttcgtcaataagaatctgaataaactctttagttgcaagacctttgttagaaccaatgggagaagccaggggcataacacttgcggcaccggcatttacaaggtcacgggccacgttgaggtcaggatacatatacggcataactacaaatccctcgtttgcaaggatctctgtcgccttgatggtttcctgattgtcaggaagcaggtatttagagtcacgcataatttcaatttttacgaaattaccgcagccaagctcacgggcaagtctcgcaatacgcacggcttcttctgcatttctcgcgccactggtgttcgggagcagggtaattccttcggggatatagtcaaggatgctttcctgttccttggtgtttgcacggcgaacggcaagtgtgatgatctctgcgccagcatccttcaccgctgcttcaatgagcttcatggagtatttgccggatcccagaataaaacgggagttaaattcgtgtccgcctatgatcagtttatcgttgttcattttttattccttctttctttgttaatcaagcatatcgatcaggtcccggagcgctgtttcaaatttggccccgtaccaatgatctgcatcgccctgggtattgatgatgcatttcacggtataatccgcagcaatttttgcagcttcaaacatactcttgtcgttcatcagtgcgccggtgaatgcggacgcatagatatcgccggttccgtggcagccctttgagatcttgtcatgctcatagtagcgcatctcgccgttttcatagacgacaacaccagtcttttcaggagcataacccacaccggtcagaacaatcgattttgctccaagcagagagagtttttcaagtagtaccttgatatacgtttcatcgtagacttcatggtattccatgtctgccaggaagcaggcttcagtaatattgggaagaagaatatctgcagaaccgcacaactccttcattgcttctacgtattcaccatcaaatgccggatagagcttaccgttatcagccatcgcaggatccaccacgcgaacacaatcggaagtacccattgtactcagaatatcctttacatagccgatctgttttgtgctgccaagataaccggtgtaaatggcactgaacttaatattttccttctgccaatgcttctggatattcggcatatcatccgtaagatcacggaaagtaaaatcctgaaatcctgcagtatgggtagaaaggatcgcagatggcaaaatacaggtttccattccgcacgcagaaaggattggcagcgcaacggtcagcgaacactgaccgacacatgagatatcctgaatcgttaaaattttcttgtaagacatgattttcattctccttatatcagttaaacttcatattcttctgctaagattcgcaaaacgatatgtgcctgatgagcggcacaaagcatcacacgggaagagacaagccctatcccgtctttcacatcgctgacttcatcaccgcacaaataaaatttgttggtcacttttcgcgttttgatcgtattggcactgccaagtcccgccatccctgatgccgctacaagatatttcttgggcatcacctcaagaacaaggtttgtcagcattgccttggcttcagcaccatcaaaagcctcacagatgatatcggcatctttgagaagctccacagcactatcctctgtgatacgaacggtatgtgtttcaatcacaacatacggtgcaacctctttcaggttctcacacaacgcttccgttttatatattccaatctgatctgctttgtactgctggcggtgcaaattggaaatgtccacatggtcgaagtcaatgaggatcagttttccaatgccggctctggcaagtgaaacggcaatattggagccaaggccaccaagtccacatatagcaactgtcgctgccgaaaacttttcctgcagctcttcgccatgtcgttcttttagtgccacgtcccaagcttcttttgtcggtatcagattaaccacctcccacaaagctaacgacctcaacactgtcaccatcctccagaacggtgtcaggatactgagccttgggaacaatatcaccgtttcgttctacagcgatccgtttgggatcgtattttgttgttgcaagatactctgcgattgtcttgcctgcaacatccaacttttcaccattgattttcaccatacaaatcacctccatgacaataaaaaaaggaagctaccgatttggtaacttcctaaaacgtactctgttattcctaatatccttgtatcaggcatccctacgttggcattatccaaatcaggttctcggtcgaaggtcacaccttcctctcagcctgtttacaagctcccgtctgtataattgtcgctgacattatacacccattatcctttaattgcaataatctccacaaatatttacaaaaaggtcaaagtattgcaataattcaatatatttctttcccattcacttttggcttctcattccaaagcataccgtaatggaggctccgccatttttttggttctttagggtaatgccaccaccatggcgctgacacaaaaccttgctgatattaagacccaatccgaaatgttctccttcagactttttctcagtggtatagaatggatctgttgcaatctttaaggcattactattaaatcctttaccatcatcggcgaccgtaatcagaagttttttgccttttgtacggcatgcaactgaaactgcagtatccgcatatcgcatggcattagaaagcaggttctcaaaaacctgcaaaactatttccaaatctaccgacaccatatctaccttgccaaactgtccgtagtaactgcaagcataataactgtatggcgttttatttgccttattcgttccaaatctcatagaccagccacaatccgcacacttgacaagccctgcaaatatcggcgttgccttttcctttgtctgtctgcgtcttgattttatctgctcctgcacacgatagaacacttccttgtcaataatcggctcgtgagtgttttctactcgaaaccattcactttcgggtttacgcactttctttttgctcttgaacgataccgtagactgcatattgtgaacactgtttccgatataaacctcacttttcaatattgccttgacatgagcaatcgtccactcataacgtttactttcgggttttccctcaaagatattgactttttggcttatcgtcctctctatcaacaaagcgtacataatgattgataatagaaaaagcggtacgttcagcgtcccgataggtcagtaaatctacaaccgcataataggctcgttcattcttcatacgtatttcaaaacggttcttaatctccgtatcttcaatctctgtgccattcttgacatactgctcataattcttctgataagcacacatatataattcgctacttgttgagcctaaatataaggtttcgcctgtattcttcggtgtatcattaccgcatttctccgtaccgctgtaatctttctgcatacggaagtaggaaatacattcgcctgccttgtatttttcctttaattttggaatatctaatatccctactcggtcattgatagccaagtcaagccgtttcatcacaccgccagccgtcatacaatccagcatgaagtcataccatgagcgttcctgtgccagcagataactttccatttgccgacaacctctgcctttcagttccaacagaacccctaaatgctcctgcatggaacacatgatgttgatgtcgccaagcacatatttgctttcatagccgtattttccataatcttcataaagcatatagtctgctttcagttgtaatacatcacggataatctttaatgcgtccgtagtagtaggaaaacggacacggaagtaatcaatcagcaaaaacaacggttcttgcggattaaaacactcaatctgtttttctaatgtttcttttagttcttccgtcaatggaagtttttctttctcaatgcggttataatgctctcgactgataccacaggcaacggcaagtcttgtttgtgtaacgtaagcgcaaaatattgctacgctgcccatgaatcacgcttgcaccaaaatgatagatgcaagcgttttgctctatgtttagttttgacagttcgctttcgcagtctcgctccatggggcaagctgttccaactgttcatctgacattttagcgtctggccgctgtgataagagatatgtcagatatttgtaggtattcaggtcattcgcttttgccatctcaaccattgtatacacaatagcgctagaggcagctcccttcgggctggcactgaacagccagtttttccggccaacagtgaatggtctgattgcattctcgctaagattattggataaactgcaatgaccgtcttccagataggtcatcagggtgtctttccgattttgggcatagttcaccgctttcgccaaacgggttcccttgtttggacgctgttgatccagccaattccagaatgcctccagtatcggcttctccttttcaagacggaactgttttctctgctccgcagtatgattttttgcttttgagtaccgctcacaatcaaacagcttggagcagaactgtactccctgcactgccggaaggctgtaatcatactctttccctttcggtatggcatctgtgaagtaacgtctcacatgtgcccagcaagagcatcgtttgatatccggcagattgttataaccctggtatccatcagtctccagatatccgctgaacccctgtaggaaagatgccgcatggaactttgcccttgtctctgtgtaatgatagagcaggatcggcggaagcccatcttctccactgcggaagagccacatccaggaatctgtttcaggattgcgctccggctcattcagtacctgaacccgggtttcatctgccatcagatatttacgcatccgtaactgacggtgaaaataatcataaacatgacagaggtaattctcggcacagtaaatgatccagttagcaagcgtagcccggcttaatgggacacccagctgcttccattccgattcctgccggtttaatggcagaccattctggtacttctggtgcattgcccatcctacaacggattccgatgcataactttctgggatcaatggttcctggacaggcgctttgacaaatgtctgatcatctgggtgttcctctgatatggcacattccgggcatttataggtttcacgatagatatttactacttttcctttggcaggggtaaagcgaaattcatggcggacgaattctttcccaatacattccatctgcgttccgcaggttggacagtttcgctcctcctccggaagagaaatgatctcgtcgcaggaaggaacatttttaaagagatctgcatgtgtccgtcgtgcttttcgcttatgttccggaacagtgatgtcatcaggaagttcctgtttccatgtcggatctgcttcctgctcggcttcatcaaaaagattcagctgaccatcgatatctttccgtttttcactggaagtaccaaaaagcttcttcgtgagatattcaatctgctgacgaaggttttctttttccagacggtctgcttccaatgttttttgtaaagactgaatcagttctgtctgtgtggaaatcgtcttattcagttggttgatcatgtccttgtacgcgaggatttttgaatcttttgaattaccagccatatgttttctgctcctttttcactgctcttattataccataaaaagcaatgaaaaagaagcagaaaacccagcatttacaagggatttcagacatgatatagggtgagaaccccctccgtttctgttggttggcatagatgttttacgcgatcattccgtaggtttgaatgcctttggttgttcgatttcaagcccggacatgagccagtcgaattgctgccaggtcaattgttttacttccaactgatttctgggccagcggaatcttccctggacttccatacgtttatacagcagcacaaatccgtcagattcccagagcaaagctttgatcctgtcacaacgttttccacagaaaagatacagggcacttcgccttggatccatatggagttgatcctctacaatagcacacagcccgtcaatggatttccgcatatccgttctgcctgttacgatatagatttcatcggcggctgtgatatcccctaacattccaactccttcacaatgcgaagcgtttgagccagaagctgaggatctgttccatttggtattgttagatgaaagcttcctacagacagcttcattggctctgctacggaaaggttatttctttccgtagctaccggaatcacatttaatggctgttcatattggagcgggtcagtatcatgaaaatccactctgacaacttcctggttttccggtgcacgatagatgcgtccggttgacgctggcaaatccacacaacctttctgacgcagcctttttacccagttgtaaaaagttcccggtttgatgtcgtgttccacacaccattgatgatctgtcaatccactttgacggcattccatgatgagacggtattgttcttcggcaggtattcttttgcttctcatgagcacacctccataaatcggatagagtaaaatgctcgcatctatcatttctggcaagagaagataaagtgaaatgcttgcattttctaatgattattatggaatgatttttagggcaacacaatccgtcgaattattttgcgcttactgtgtaactccgtattcgtcacgtttacgttttaattcttcaataaaatctttatcattcattctttaattcctccaatcaaaaaaaggcaactaccgtttactgataattgcctacatttctacaaaagaaaaagacaatcaatttcttatttgaaatcaactgtctttcttaatgttatattctattttcccaagtgataatggcataatttatatcacaccatgtaaaatgcagtttcgccttgtaaatacagcgttttccgcttgttaatgtatattgactcttgttttttgtgccccccttgttagataacgggggcttgatgttcgctcgcaagctcgctcacagatgaagtgaaccagccacttgcaagcatggcggaaaaatcttggggatttttccgccaccatgtctggatcactccgtctttgtaagagattttaggtcatcttccacataaactggggttgtacttatttatcatttttcaaatgtgtagttgataaaagtaaaaaagaaatacctaataataaaaatattattgctgaggcagtattcttatccataaatttcattattgacactataaagaaacatattgaggcaaataaaaaacatataaacctaattttatctttttccataatttttccacctttttaactgctaattatataaaactcttttcctctttgcaaactgggatttacctatttcaaatcaaagagagaattttcatagtcctttacatagtaccgtacatttttccgccctttttgaataatggtgtgtccttctgcttctaatttttctttttgtgcttcaataccatttggatatttagcatttagttctccgttcgctttcaatgttctccaataaggcgtttcatcttctgaacgctgataactcgcccatgccacaatagaaacaaaaattcctgctgtaatcggttctgtaaaatctgcaccacttaactccgcaaagtattctcgtattttcccgacggtaatcactttaccatacggaatttttttcattactttgtcatagtcgattggcggtgcaaaatacattttacttccaccatatttttcaatgcttttctgatctttaatgatttgaaattttggcatatccttattatcgtgcaacatagcattaaaatcttttttatcttcgtttgccatttctgccacctcctactttaaggataatctgtttggcattcctatgcaatgaggctgtttgaaaaaacttgacaacttcaaatttatcctttcaagtttttcaaagcagacggattattctcatggattgccctaacagtaggacaattttctaaatttgaacagttggcacaactagtaacaccttttttcattgcacactggcgaataccacagatactatcacaaaatacggttttaagtccgtccacacgacaaccttgacagttaatttgctctggaagaataggagcattatttaattcagcccatagttttgcagttttttctcgcaatttttgatcgtcattgattgttgcaatatatgcgtcgcatttttcacaatctagtccacaatatgcaatcatttttttcatcatcgttatgtacctccacaacttcaaatttattgctctctatataaactggaattgtctatttgacgataaatctataaagtgcataggcaatccatataatccaagaataatcccataaatcaaagagaatacttactgctaaataaaagatagcaacaatgattgctattatccaatttttctttttagtcttttccacaatcgaccacttccgcatcttccaatttatctttatgtacattatatcataccccttcaatattgtcatttcttttctgcttttgaaaagctacttatccgtctatgatttgtaaagggtgctaaagcattgcttacgcaacaagcccttgacaacccacagactaataagttttaggacaatcaagcagaaatgaaatagcctgctgtttcactacatagaaaaagagataccaacacgtttatgtagtatctcttagcttacttagtagcgacattcttctatttgcaagcaggtaaacacaggttatttctcaatatccttttgtttgggaaactcccgactcccactttgatatagcagttctcgacacatataattcttctgccaactcttcctgagtaagtcctctgctttttcttaattcctgaagtttctcatgaaattccatcgcagaacctccttaattttctcttttataacacaacaagacagccgctttataaatacaaaacaatcctatactgagcataatagaacctacaatatccgtcaaccaatgcacaccggaaatcagtctgccaaataccataaaagcagaaaaacaaatgaccaaagcttttataacctttttaacaatttcatttttcgacctgcgatttatttgttcgataagtgtcggcattacacaaagtacaagaagtgtagttgaggatggataagacgcctccataaatccttcaatgagtattggtctgtaattgattggtatcatttcaaaaatcagatacccaaaaactactaaaacgtaatatatccctaaaagaataatatcatagtccactttaaacaaacttcttcctttcatcaattgaacacaaccaatcccaccaaatatcatacaaataaaaatcggaacaagtcctaaccagtctgtgatagtataaatttccatatgcacaccagttaattgatgaaaccagcagttaattgttgcaaaacctatatcagtcccatttactcccaaagtctgcacatctaccctttgtatcaatactgtccagataacaaatcctacaacgagtatacttcctatacctaaaaatctttttcccttttctttcattattcgtagtcctttctcttttcgttttgcctatcggctaatttcaaagtagcaaaagactccctaagcataaagaaacgcagtgtcacatacgtgacacgattcgtgtcacgcatgaaaacactgcttcttactcgtttaattagaaaagatgtcccggaagttttagtttctctttataagaaaatcctttatcaaattcttctgcttcgtcttcatccacaaaatatccttgcggtggtgtatactcacccgtcactccacttaaatatcccggaatcagttccttacaaaggaagaatgatgcatctgcatcttcaggtaaatcatgataacgaataccaaactcgcttgcgaatgtaaatccactttttccataaaagttgatattaccttcaaagcacaacgctccacaaccaagttccgctgctttattcaaagaataatccaacaatttttttccaaatccctgtcttttcaattctggtgtaatgcagattggtcccattgtcataataggaatatctcgtccatcatctgctttgatgtttgcacgtatgaacatattttgcccaatcaactgtccgtccctctccatcacaaagtcgagttcaggtacaaatgcctcatcgtttcttaattgattcagcacataatgttctaagcagcccggacgatacacattccaaaaggcttctcttactaaattttcaacttctctgtattcttcttctctttctaaacgtataatatagtcatttttattcattaatttttcctcctgatgattgttgactgcaatgctaggaggttacgattcgattgttattcataacctcccggttacgctacaatctccaaggtgttgttttttctcaaacagcaatctccttaaaatataatatttataatcaagcctttcggctggattaacagaaatgaaaattcaaatttatcgttttctttcagtatatcataattataatctttccacaaaacaaaaaattttaattcctacggatttttctacaaagcatataaccacatattattacacttcatcagaaaaactttctcaatctatattgaaaaatcgtagcagaatatccgacattctatctatcaatagtttctctttagcaaatataatcttagtacggtatcctgttccatccggtgcaaattttactatacttcttatagtttcaaaagcaaacacaccaactactttctcactaaaaaagactagaagagacattttctcttctaatcctttatactttatcacagaatactttttgcttttatttttctcatggtcacgaggcttttttcgcttaaatcctaccttttgaacacgtgttgttacatataaaagtcttaaccccactaaacactcttacctcacctcataaacaaccttcacaaaaacacctcttttgttacatctatatgtaccgtactcttactaatcccaaactgcttcgctgtctgcctcactgtcgcattattttctattatataagttgcgatctcaacggccctctcctcgatataatctttcacaaatattcccctgcaaatatctttttacaatgtatgcaggggaaatacttaatatgtttatcttagaatttattggaataattccggatcattttaatcttccggcggtctttctccttttctatccatcaaaattagaaaacggttatctgattctattcttcttccaatgtaatgatatgaatccaattgtctccgaaatcatatgtataaatacaggtagatgccgatttaaaaatattgctcaattttgtcgtatcatcgaacttcacttcctatccttcattttaactgcttttcatctgtaactcaagaaaatgagtgacaaaaagaccggaattcccctgcagtcattactttttccccattctccacacttcaaaacctcaaaattttattgtaatattttaccaatttttatagtattacacgccaaaaaaccatgatattataaaaacaattcttccagtttttcaaatacgcgcgatctgaaggataacaagaagagtaaattttttatgtaggaaggcactatgaaaaatcgtttacgatccatgtttatagccgccgtactggttggcacagttgtcgcaggaagcttcacagctccattttctgttcaggcagcgaaaaaggacaccacatcttttgaagatttaaaccagtctcaaatagtagaagcaatgggacctggctggaatttaggaaatcagctggaaagtgtcactgacaacgttccggaggaaacaaactggggaaatcctgtaatcacagaaaaactcattcaaagtgtaaaggctgcaggctttaaatcgatccgtatccctgtatcctattttgccaaaatcgacgatgacaaagattatacgattgacagcaaatggctggatcgtgtacaggaagttgtagactactgcattaaaaatgacttatatgcagtgatcaacattcacggagatggctataataccatcgatggcagctggcttttgtgcaatggaaaaaatcaaacagagattaagaaaaaatataaaaaggtatggaagcaaattgcagaaagatttaaaaattacgatgagcacttactgttcgagtccatgaatgaagaatttgacggcagttattctgaaccgaataaagagtactatcaaaatattaatgactacaaccagatattcgttgatactgttcggaaaacaggagataacaatacaaagcgttggctgattattcccggctggaacacaaatattgactataccgccggagattacggttttaaacttcctacggatcaataccgcgacaaatcaatcgataaagaagaacaacgaattatgatttctgttcactattattctccttgggacttctgtggcggagaaaacggtgtgatcactcaatggggcaacgaagcggatgatccttccaaaacaagtacaacctgtgacgaaacttacatgaaaaatcagttaaatctgatgaaaacaacatttgcagacaagggataccctgttttcatcggtgaatacggctctatcggcaaaacatcctatgacagtgaaaacgaatattaccgtgcatattttgcccgaaaattgtgccagctgagtcgtaaaaacggatgtattccaatgtactgggacaatggatacaatggtgtccacggattcggcttatttgatcgtacaacatgtgaagtcacacagcctgtcattattgatgccattatggaaggttttggtcagaaagcatctcaaaacagcactctgatgtccgtccgcctgtatgtgtcagacagtaaatactggacgaccattcaaagtgataacactgcaagaattaccaaaaaaggcggcacctatacgctgaaactgaaaggtgataaagatatgcttttaaacattacaaccattgctttaaaagactgtgacgttgaacttggaaatcagacaaaatccgactttaccaatgctcagattgtaattgacaaggttctttttaatggaacggattacacggtaaaagaaaataaaaatgatgaggttttctctgaaaaaggcagccttcagatggatctgatcaatcagtggagcgaagcagagccgatgatcgaaggtctgcagaaaaaagaatctttttctttccaggatgcagactataaagatgaaaatgtgttagaggttacgttcaccatctccaatttgaaataaaaatagcagactcatttcaatatttcatgtaaaaatgaggccgggaaagcagattattttgctttacaccagcctcatttttgcttgtctacttaattaccaagatggtgaatgaatacctgtactgtgcaagaatcaaattctgctttgtattcattgttcttccaacctgtgcacatcttccggtgataatccggaatactccgcgatcttttctatcggcaacttatcctccaacatcttacgcgccatttccactgcgtgctcatgttttccttcacgtaatccttcacgtaatccttcgcgccttccactagctaacatatggcgatgatcccggattgccttttgtcgttcctcatattctaatcgtttttcctcgtctgcactgatttcttccaatttatcatatgctttatggatatattcatctttttctgccaacacttcaatttcctccctgctccttgcaccgaaaaattgtgcccatcgaaggagttctgtctgtggatattcatacttcgcaagctttggcagctcaagtacatgaatctcgaatttgtcggaatacatgtcccgtatcgtatcctcccagatatgaaaacaagaataatatctctcatgttcaaacagtgtaaaatccagaatccctacatggatacatttcttcaacttatcataatcttccccttcgtggatctggtctacatacattttcccaagataaaacaaagaccgctcctgccagtaatcataggcaatagactgcatttcaatgtttagctgctctccctctcttagacgaactcgcacatccaggattccgtacttctcttccttatatttcttacgaagcttcttcggaagtaattccatatccagaatctcttccggtggaatccgaagaaacgcacctataaatcctcggcgcacttcttcatcttccatcagctcctgaaaacaaaaatccacgctaggtaacataataaacttctgttctttcgttttcttacacatataactgctcctttccacggtgtggaaaacacaatcatacatgatgttcttttttgatattttcattataaagaaatattgtctattgtacaactgcttttccatcatatttacttgcctctttgttcagttaaattttttctgaaatatctgaccgaacggtcttgaccttctagaaatcatttagaaatttatcagaaagtttagatgattcaagtataatatgacagtatatgaaaagcaataaactatttattaaatttccaaagaatcccttttaattactcaaactttgcatttcaataagttcgtatacaccttgaaaatccaataattgagggcgtaaaaaatagtatggatgccatccggtttggtagaattgagttactcaaaaacaattaaaaaccgtaggctcatgctataaataaaagataacaccagacacccagaatgatacccaaatttttaaaactattcgaagatttttaatggttttcatgtttctccagtactcaaagcagcaaattcattgtgtacttcacttactatcgttgtatttccggtacattttcttctttgtatgttactctaaaatgttttgccccaagatcctgcacaatcttttgtaattctcttattcgcgctatttttaaataactaaaaatagtcgtctaacgcaatatattcatctctatcacttgggtctacatcataaaaagtcggaatctctcccgacttttcctttattcactcaatttaaatcgtttcttacttttttacgccctggcatttttgcagcaatctgctttgatacccctttcggcacattgatctgtactccaaataacatccgaataaaccagatcataaacaagaatataaaaattggaataagacaagatgtaaccaacatcaccgcgatcaactcaataaattgatttaaaagttcttcccctttttccaacaatcctgaaattccatctttgattttcgataatgctttctctatgatgttaccttctgaatctgtatttttctcaatttcattcgttatatcctgtgcttcctttacagtctcttccatcgttgactcatatgttttttctatcattgccgaaacattcatgctgaatggaataatcataaatataacaagaccgaatgctgctatttttgctgccaatattttcaaaaccgttcgattaaatccgattcctgccgcgaacaaaacacacgctgccggaatcaatatagaaaacgttgcatatccggtaagtgtcaccaaatacttttccaaaaatataacgaccagaataatcagaaaatatgatgttaaatctgtcagcttatttgctatcggtgttgtcgcatctccgggaattgccgcaatggctgttgatgctgccgctgatgttgctgttagttttagaatatctgccttcttctcatccagtgcctctatcgtttttttatggttttccggattgcttgccgcttttgaaacaacagtcatcgaaaggaccattatcacaagtgccactgccacccatgccagttttttcacattcttcttttctatcattttctcatttcctcctatgtgcaatcatatacacagtataccctacaatttgacttacttcattaatttttttcatcacggtctttcctttctccgtgtaaatgagtatatttcatcacgctaacgtgatagcaatactcatttacggaattatttgttattcgcttcagaaaagaccgtgtaaatttcgcgaattatacatcaaaacggacgtgttaactctaacacgcccgcacatctgtccttattttattgtccctgtatccctatatactgtatcgcccctatgaaatctccgccagcatcttctccgaatcttctgctgccttcactttatcgtttgcctgaatgatcacaccctcttcatcaatcagataggtcgttcttaccactcccatggatacttttccgtaattctttttctctttccagacatcatatgcctgaatcacttctaattccgtatcagaaagcaatgtaatcgtcagaccttgtttttcttcaaatcttttatgcgacgcaacactgtctttgctgattccaagaattaccacacctttttcttcaaactgcggataacgttcgctgtatccgcaagcctgctttgtacaccccggtgtattatcccttggatagaaatacaaaagaactcttttccctctgtaatcttttaaactgtgtaactctccattctgatccggaagtgtaaattccggagcttttgttcctgtttgtaacattgcattttcctcctgttttctgatttttttgatattccaaccttctttacaaccgtatctctcccagtctgccttctcctttcagatactttctgtaaatcacaaagaacaccagactggtcagacatgctgccgctccatccgcgaggggctctgcataaaatgcactcttcgccgcaaacgcgatcggcaggacacatgtcatcacaaaatacacaatctttcgaaacagtgacaagctaagggaaagccttgtcatcccaagcgccgtcagcgcatccacaaacacatactggaggctgagtgggatcaccatcaatgtaaacacctggattccccatatggacagttcccggtatcttgcattgtctgtaaaaatctgcgcaaaatactgcggcagaattctggatacaaggaacatcaccgttgtaaatgtaatacatagcaccaatacccacttcactgtcttacggatacgatccggtttgttcgcaccgtaattaaaactgatcaaaggctgtgatcctcccgtaattccaagcatcggagaggtaatcaaaagcatatagctctgtacgatcgttgctgccgtgatcagcgtatctccctgagattcgccgccataatactgaagtacagcattcaatgcaatgatgatcacactgtctgtcgcaaggatcaaaaatggcgaaaaaccgattttacagattcgtttcccaatctcccactccggctttacaagatggatcggaatctgcatcttcttactgtgtaaagtcaaaagtacaaaaatacaggacgaaagctgtgcgatgactgtcgcaacagccgctcctgcaatatccatttcaaatacaaaaataaaaatcggatccagcacaatgtttaccactgctccgatcaatgtagttgccattcccagaaacggaaatccctgcgctgtaataaaatagttcatgcccatagacacaagggcaaaaaatgttcccagagtataaatcgtcagatatgtattcgcatatggaaacgtcacttcactggcaccgaaccagttcagtaaaaaatccttgatcagcaaaaacacaactgtcagcactgcggaaaatataagcagcatggaaaaactattcgccaatatccgttgtgcgctcttcttatctcctgcccccagtttcaccgaaaacgtaaccgatcctccgattccgatcagagcagcaaacgaagacaaaagcgtaatgatcggagcacatactccggcgcctgcaagggaatccccgccgatccccggaatatttccgatatagatccggtctacaatactgtagagcacattgacgaactgggcaaacataaaaggaattgatgtctttaatactaaaagtggaactgaatcccttccaaaatcatttgtctttttcatgctgcaccactatcccaccagaatctggtatcctttttcaaatatctctcccggctgcaccgcattgattcccttcttttcagaaatatctttatcaaatccggtatcatcacaacggcctgcccatggctccagacatacgaacggcgcattcttcggtgaccagattccgtaactgtaaaatccttcactctttacgcctacatatggctttcttccatcctttttgcacagccatacttcttttaactgataatcatcacagatcagtgtatccaccccaaacaatttttcggaaagctgcagatatccgtcctccagttccagagaatagctttcttccggcaggcctgttccgcattccagattcagcccgcagcattccagcgtttccatcttcgaaaaccacagaagatagtcgtctttcgtctcctttgcgccttcaaacataaatgccggatgtgctccgatcgtaaagtaaatcgtttcttctgatggattttttactttccagtctacaaaaatattttttccatccagacggtatgtgatatacagctcaaagtcatagggatacacttctctcgtctcttcattcgaacaaaataaaaactgcgcttcctctgctgcagattttacacaacgaaactggctgtctcttgcaaatccatgctgagacgtcggatactgtgttcctttgatcagaacagtatttccgtgtgtcttccctacatttgggaacaggatcggagaatgccggttccaaaattcaggatttccgttccacaagatctctgctcctgtctttttgttaaaaattcttgtcagttctgcgcctttttctgcgatttccacacaaaggcatgcgttttccaatttcataaaactccctccgcttcttttcattcgtctactacaactgtacaccattctgcctgtcagtacaaccagaaagcaccggaaaaacaaaatctgttttccggcgctctctttttattcctgtgcattatctgtactgctctgatctgaactctcgtccgaactctgatcggtattctgatctttgttctctgttgtgctgttctgtgtatctttcgcattttcattcgtcgtttcgtcttcctgctctacctgaacacaactcttctgcagatacttggcagctttttcctgcatgatggactgctcgatgttttcttttccgtttttctcttcatattccgcaatctgatctgtacgatatccggcaagtgctgcatactgcttcagcccgatctcatactctttatctgtaggttctaaattctttttctcacagagaagctctactgccatctgatttctcacggtattctctgctactgtctgtgccttctctttaaactgatcttctgtcattcccatgtactgagtcaaataatctcccagctccatctgatagtattctgctgtactctcatactggtttatgatcgcctctttctgctcttttactttatctttcggaagatcttttttcacttcgatctgatccaccagagcattcaaaagattctggtacatctgctggttttcgattttttctttgatctcttttttatattcctttacagttgtcgcttctacactgttctctttgacccacttatctgtcagcttcggcacatctactgtataaatgccatttaaagtaatggtaaacactgcgacttttccggccatttctgtattcatatacgtatccgggaactgtaccgtaatgtcaaactgctctcctttgttatgaccgacaatctggtcttcaaatccctggtagtctccgtttgcaccgataaaagaaccggaaccaagctccaggtctgttccctgggcagaaccaccctgaaattccacaccgtctacttttccgacataatcaatattgactgtatcccctgtctgcgctgcacggtctgtcacctctgttctggttgcatctgcctgcagaaaataattcacataattcgtcacctgatcatctgtcagttcagttgcttccacctgcggcacttccagtcccttgtactgtttaatcgtaatatactcattggataactgactggaacaccctgtcagtgatcccatcaggaatacacctgcaattactgcaattaacttctttttcatcttcttgcccttccatttcctatatgatcctctgcctgtctttttgacagcctgttttttattataccacattctgttgaatgagacgtacatttttcttaagagttcataagattttcactattttttctgtctgtttataaaagcggtgacagcaatcttgaaaactgctcttttccccggatgataagacttctctggtgatacgcatttctcgtgatctgtgtagattttgtcatatcattttcaaagctctgctccaatttctgcgttgtctcctcgctgtataccactgcattgacttcaaagttcaatccaaagctgcgaaaatccatattggcagttcccacacacgctacggttccatccaccatcactgtctttgcatgcagaaatccgttgtcatacacataacattttgctccggcctccaccatttcaccaatataggaataggtcgcccagtatacaaacggatgatccggcttgcacggaatcataatccttacatccacaccggaacgggcggcaatcttcaatgcatccagaatcgaatcatccggaataaaatacggtgtctgcagatatacatgatcttttgcgctgtgaatcagtcgcagataattgtcatggattgttttgatctgcgagtccggaccactggaaataatctgcaccgggtctcttccctcccgctcatacttcggaatctcaaataaggtatcctcctgaaacagattttcctttgccgcataattccaatccagtacaaaccgtacggccagagaggttacggctgccccttcgatacaaagatgggtatccctccagtaaccgaacttctttttgtccagtcccagatattcccttcctacattgaaaccacccacaaatccgaccctgccgtctatcacgacaatcttgcggtgattccggtagttcattcgaagctgaagatttccaaacagcgccgggaaaaattctgccacgtggattccttccttctccagacgttcccagtcccggttatgcatccctcgacagcccatactgtcaaacaaaatgcggacctcaactccctctttcgcctttttgatcagcaccggctcaatatgctgccacaattcatcattacggataatataatactgaaaatgaatatatttttttgcttttttcatctcttccagcagcgctttgaatttttcctttccatcggtatagatccgcacatcgttattatctgtcaaaacagcctgccctgcttccagattatataaaatcagatcccgataccttgccaccgctggattcgtcaggcggagcctacgtctgtatatcgtctcttcctgcctgcgcacagcatattttatctctccttcaatctcttttgccttaaacatcctgcttttatgaaaatcctgcccgatcagcagatacaggacaaatccgagaatcggtataaaatacagcaataacagccaggtccataccgtctgcggagatcttctctgaaaaaacacaatgaccagagaaagcaaaatattgatcacaaccagattgtccatcataaaatgatacacactgactgcactgttccatatcgtttctgccataaatacctctcccctatctttttctcatttccttagtatacctgttttctccaagaaaagtaaagccctgccgtccaaatctcttgcacttcccgggaaacaatgttacaatattacatgcataattatgaaaaaagagaattttaggagggttttatcgtgtctacaggatggatcgtactgatcgttgtacttgtgattctgatcggtgtactcgtcggcctttatttcttcggaaaaaaagcagagaagaagcaggcagcacagcaggaacagatggatgccatggcacagactgtcaacatgctgatcatcgataaaaagaaaatgaaactcaaagaagccaatcttccttccgcggtgctggagaatacgccaaaatatttgagacgtaccaaagtacctgttgtaaaagcaaaagtcggaccaagagtgatgactttgatgtgtgatgttaagatctttgaccttatcccgatcaagaaagaagtcaaagctaccgtaagcggcatctacatcactgctgtaaaaggtgttcgcggaccacttgaggctccggaaaaagcaaagaaaaaaggcttttttgcaagattcaaaaaagacaacaaataagacaaagagcattgccggcagaaaatctgcactgcagtgctccttttttatacagcaattccgctgcctttggatacaatattcattcggatcttacaattcgcaagcggttcatgattcacatccagctcataatccacccgtactttgatcgtttcatccaaaacttcaatttccatatttctggtattcaatcctaccagcatctgaccatatggtgttttgtaatatgtcagattcttcttgtttttctcaaatatcatatgtgtattcgataatccgcttttcataatctcaagactgtctgttcctgatattttgattttattcttgatcgtgtcactgactccttctacgatctcatcatagatgatataatgttttccatttctgtagtagtaagtagccggtgtcacaacttcgatcacatcatcctcatccggtcccggaatctgggcgtccatatccatatgcagccctgaaatactgaccaatacatcctttgtcatctgtgttcccctaatattcttctatattcacaatatttgctttcgaaatatcaaacggcatcactgtatttgcaaaatttacaaacttttccgccgcatcgctgacataaaattcatatttgctacttgtgccctcttccccgtcattttccatatcttcactctgaagaagccgtttgagatccatggcggtctcataggccggattgacgatctggattcgttctcccatataagaacggatcttggaacgtaaaagcggataatgggtacatcctaagatcatcgcatcgatctctgtatgctttaacgattccagataatattcaataacctcttctgtgaccacatgttctttgaatccttcttccacaagagggacaaacagcgggcaggctttctccctcacatggatattcggatccatctgatgaatcacctttgtataagtaccgctcttcaccgttgcatccgttcctaccacaccgatctctccgtttgccgtagcttctactgccgcccttgctcccggaacgatcacaccaatgattggaatatcaaattcatcccgaacagcatccaaagccagtgcacttgccgtattgcaggcaatgacaatggctttgacctgttttgttttgagaaaacggatgatctgctcagaaaagcgaataatattgctcttagatttacttccgtatggaacgcgggcagtgtcaccaaaatatacaatattttcatgcggcagctgccgtgttatctcccgtacaacagtaagtccccctacaccggaatcaaatactccgatcggagcctttttcttctcacattccatactcataatttttctctcctagattgcaaatgattttgcgattttatactgatactccggaattgtcttcttcatggacaatgcctgatcaatatcgaaatctacatattttccatcctgatatccaatgacacggttggattttccttcgcacagtaagtcaactgccagtgcccccattgtagacgcatatactctgtctttacatgtcgggcttcctcctcgctgcatgtgtccgaggattgttgctcttgtctcgattcctgttgcttcttcaattctcttcgccatattgatggaatcaccgattccctctgcattgatgatgatgtaattctttttaccgcgttttttgttctccaaaatatcttcgatcaacgcctgctcatcatagtctttttcttccggaagaagaatcttttctgctccgttggcaataccgcaccacaacgcaaggtatcctgcatcacgtcccattacctcaatgatactgcatctctcgtgtgaagtagatgtatcacggaccttatcgatcgcttccatagctgtattgacagctgtatcaaatccaatcgtataatctgtacatgcaatgtcaagatcgatcgttcccggaagagcaatcgtatttactccgaggttcgccagcttctgtgctccggcaaaagatccgtctcctccgattactacaagaccgtcaattccgtattttttacaaattgctgctgctttctgctgtccttcttctgtacgcattgtctggcagcgtgctgtctgaagaattgtaccacctctctggatgatatcagacacatcgcgtgccgtcaaatcaatgatctcttcttttaaaagtccgtgatatcctcttctgattccgcgtaccttcagtccttttgcaagagctcttcttacaactgcacggatcgcagcgttcattcccggtgcatctccaccacttgtaagtactccaatggtacgaactctatcttcaatctcttctaacattttttctttgtctgctttgtttgccataacttttccacctttctgaattcttctactcttcaaaagtaaagtttgcctattttttaacactccgggtatattctaccttatttatattcctttatcaatagatttttctacgacttttactcgcttttccccgtaatgattcatcaatctgctcaatacttcctggccgatccgaatgtttctgtttctcggaagccgcttgatcgcccgctctttctgacaatagatcacaacctcgtcatctccttccgagtctgccaggtatccatataaaatatgctcatttcgcagaaaatcttctttatctgaaaactgcacccacagctcttttttggtctgctcaaacggaatgatcgtctcacagatcagcttgctcggccgctcctcttcctcggatactcttccctttacaaagatttttttatcaatctccagatactctctgtttttttcatagtcccgcgggaagacgatcacctctaccgttcccaccaggtcttccagagacaaaaatgccatcatctgatttgtctttgtatgcttgatcgtttttgcggtaatcatgccgcctacgatctccctcgttccgtcatgcacctttgcccggcctgtctcttcatccggctggaaatccagtgtggtggctgaaatggattttctccatttgtcctcatactcctgcaatggatgtccgcttaagtaaactcccagcacttccttttcaaacgccagcagattctctttcgaatactccccgacatccggcagtttgatttcaaactgctctttttcttcctcacccaccatatcaaacagtgtcatctgaccggtcatggcatatttcttttcctgattgacgtgatcgacgatctgaacataaatgctcataaactgctttctcgtgcctcccagacagtccagcgcacctgatttgatcaaatgctcaattgcccgtttattcagtccatccttgactgacatccgactgataaaatcttccagatttttaaacggcccaaactcatcccgatcttctatgatcgcagcgatcaccggtcttccaatgctcttgatggccgccagtccgtaccggatgtcgttgccgtctaccgaaaagttgccgatcccgcggttaatatccggtgacagaatctgaatattcatctgccggcaggcataaatatattctgccactttggacggattttcaatcacggaagtcatcagtgctgccatgtattccaccggataataatatttcaggtatgctgtctgataagaaacaaccgcataggccgccgcatgggatttgttgaatgcatacttcgcaaaatcgatcatttcatcatagatcttattggctgtcttttcatcaattccatttttaatacagcccggcacaccgttctcctcatctccatagacaaagatctggcgctctttctgcatcacatcgccctttttcttggacatggcacggcgaagaaggtcgcttcgtcccagtgtgtatccggcaaggtcacgcacgatctgcataacctgttcctgatagacgatacatccgtaggtaggcgccaggatcggctccagctgcggacagtcataggtgatcgaccctgcatcattttttccccggatatactgtgggataaagtccatcggacccggacggtacagggaaatcccggcaataatatcctccagactgtttggcttgagctctttcatgaagcctttcattccgccgctctccagctggaagattccatcggtcttaccggttccgatataagaaagtacctgtttgtcgttatagtcaatctgatccatatcaagttccggatttttgctttttgcaagctgcaccgcattctggatcacagtcagcgtccgaagtcccaggaagtccatttttaagagtcccagttcttccagagtggtcattgtaaactgagttgtgatcgagccgtcagaagctcttgaaaggggaacaaaatcatcgatttctctctgaccgatcacaacgcctgctgcatgcatggagctgtggcgcggcagtccttccagtcgtttgcacatgtcgatcagcagttttacctgcggatcattttcatatgttttacgtaattccggattcatctgcagtgctttatcaatcgtgatattgagttcctgcggaatcatcttggcaatcgaatctacaaatgcatacggaagatccatcacgcgtcccacatcacggattacacctctggcagccagcgtaccaaacgtcacgatctggactacccggtcttttccatacttacgcacaacatagtcgatcacctcctgccgtctctcgaagcagaaatccacgtcgatatcgggcatggtcacacgctccgggttgagaaaacgctcaaacagaagctgataccggatcgggtcgatatttgtgatctccagacaataagaaacaatacttcccgctgcagagccacgccccggccctactgcgatcccgtgatctttggcatatttaataaagtcccatactatgaggaaataatctacatatcccatgctgcggatcgtatctagctcatagcgcagccgttctttcagctccctggaaggcgctccataatgcttttcaagtccttcccagcataacttgttcaaatactcccaggaagtcatgccgtccggcacatcatactttggcagctttgtgactccgaattcaatctccacctcacaccgatccgcaatcttctgcgtattctccagtgcctgctttgcatatggaaacagcgcttccatctcctgaggggactttacataatactggccgccctcataccgcatcctgttctcatcgtccagcttcttcccggtctgaatacagagcaggatatcatgcggcttcgcatcttccgcgtacgtataatggatatcattggtcacaacaagctcgatccctgtctccttagaaagctggatctgtctctggtttacaagctgctgctccgggatcccgtgatcctgcatttccagaaagaaatttccttttccgaaaatatcctgatactccagcgccaccttcttcgcctcttcggtaagtccccggctcagataccgctgtacctccccagcaagacaggcacttaaggcaatgattccctcgtgatactgacgcagaagatccttatccacacggggcttataataatacccttctgtaaatcctctggaaacgatcttcatcagattggcatatcccgtattgttttctgccagaagtaccagatgatgatatctgctctctccaccggcagtctcacggtcaaaccgggaattcggcgccacataaacttcacagccgagaatcggcttgattccctgctttctggcttccctgtaaaaatcgatcacaccgtacatgactccgtggtccgtgatcgcagcactgttcatgcccagttctttgactctggatacatattcttttattttgttggaaccgtctaaaagactgtactctgtgtggacgtgtaaatgcgcaaaactcataattcacctctatatccagtattgctgtaaatctaaaaagggcgttcccttacagagaactgcccttacatcttctcgtgtctgtcaaaaccggcgattcaaaatctgagatattcttattcaccgttgatcataaaattgatcagtctttctgtatcttccggctcataagcaatgatctcaagctctggaatctctccgtttgagaaaatatttgccatagatacatactgggaaagtttggatttcaggttcagtctgtctccctctcctgttaccagttctactcttcctttgcagttgtctactactttaaaaaatgcgtctatgtctgtaatattctgtactttcatttctatctgtcccctttcttctctatttctttcttcattatagcctatttaccatggattgcaaggctttttagcgaattcggatactgtccggaaagatttttacgcggttttctttcagaagtcttccgacggcacgcttgaatgcagccttgctcataccaaactctgccttgatcgtatccggatctgccttgtcattaaacggcagtactccgtcataagactggattcttttcaaaatcagttctgcatctgcatccatctgctgcggaatcttccctctgacacttaaatccagctttccatcttcctttacatttgtcacacgtgcttcgatttcatcaccgatacgaatctttccaaaaacatcctttttcgggattcttgcagaaaactgatgatccaccgcaacaaaaactccaaactcatcacttctgtcgtatacaattccttttacctgatcgtctttctgatatggagagtctgtacgcagcatatgataaactttcatggtggcgcaaagtcttccgctcttgtctacgtacaatgcaacaagacacttatcgcctttctgtacttttgctgtctgttctttaaatggaaggaacagatctttttccagtccccagtccagaaaagctcccatctttcctgtatctgccacttccagaactgccagatgtcccatcgtcagcttcggttcattcgtcgtcgcgatcagacggtcagacgaatcccggtacaaaaatacttccaccggatcccccggttcaattccttccggtacctgctttttcggaagaagtacacgttcttcatcatttcccagatacacaccaaaatctacaatctttacaacagttaaaacctgcttttctcctaatttcatttaaaatctcctcttcaccgttcttcgaacagtataacatgctctcttacttgatttcaatcactgcatacggttttccgttttcatcgcacaattctgtcacaatacgattttcctctctcgccactttcggaaagatcacatctccaagaactgctgatttcttgtattccacccggatctggcggactcttgtctcttccggcaaaacctccagagccatctgtacatactgacagttattcacatgctcgttggtatcaatgtgatacttcctcaccggaaacgatggtttttcctccagattctccggaagacggatctttctgtcttcatactccatctcaagcgcaggctctgatccatatggaagtacatcttccggctcaggtcttgccggtcttcctttttccatatccataaacacccacacagaattggcatacgcaagccggtttccccgggcatcatcgagcacaaaattccggtttccatacaagcctttaaattccgtcgcaaaggttcctgctgtaatacgctctcccaatgccggcagacgttcgatcacgatctgccagtaagacaaaatccatgcttttttctttgcctttaacacctctgtgcccaacccgatatcctcagactgaaacgtactgcagtcctgaaaataattgatcagtgccggcagggtcatattcccggtatgatcgatctcactgtatcttactctgctgtcaaatgtgtacatcttttcttccttcccgaacagttcctgttccttatacgtgtgccttatagctgtgttccatcgtaatgacacactgatatcttttgtcaatctcctgcagcttttccatcaattgaagctgcagattgtttttttcttcctcatcatattcaaatggtacgaccatatcaaagatcagattgatctgccccatcccgttgacaacacgcagatcatgaatgctgcactgaggatccagttcctttaatgcggcttccacttctcctctcaccgtcatcacctgttcatcccgcatctcgatcggatccatatgaatcaccagaagaattcccagctcatccaccgcatcccgttcaatccgatcgatcagctcatgggcttcctcaatgtccgcgtcgtttggcacttccgcatgaatggatgccatactttgattcggtccgtaattatgtatgatcagatcatgagttccctcgattccctgataacgctctacaaaatgcttgactttatcatattcttccggatcgattgcttctccgatcagaggctccagcgtgtcttttgcaattccgacacctgcccacataactaccagagcgactccgatccccacaatcccatcaatattaagcccggtcagccggaagatcaccagagacaaaatcgttgcactggtcgtgatcacatctcccatagaatctgtaaagactgccatcatcaccttggaatcaatcttctttcccagctttttattaaatacaccgagccatagcttgactccgatggataaaatcaggatcactaccgaaatcaaccgaaaattcaaggtttccggggttctgatcttggaaacagaatccttcaaaaaagtaaatcccacttccagtaccagaaatgatacgatcaaagccgctatatattcaatccttccgtgtccgaacggatgctccttgtccgccggcttgcccgccatcttcaccccgataaaactgatgatcgaagatgccgcatctgacaggttgttaaacgcatctgctgtgacagaaacactgtgcagcaaaagccccacaataaacttcacaagaaacagaaatacattacaaacaatccccaccatactcgccagcactccatatgcagtgcggaccgcagatttttctaccgcttcatagtctttcacaaaatgtctgactaaaaattctgtcatacttttctttcgtctccttctgttgttttatttttgaaatatctcctgcaggtaaaagcgaaattttactttctccggttttttttcttcctctgacaacaggatcccgtctctctcacttttcgtctcctcatttaccgtatgcactgcatcccaaaatgccagctccggatagagcattccccaccagttgtgacctttggcacttccgatctccacacggagtgcttcgtaatttcctgccggaaatgtcatatcctgatacttcttttccggaaaataggtggttgtcacagccgcgttgaccggatcatcgtatcccttttctgtaaggcacttttctgcagtctgctcaatttcatcacagtgggaacgcacccactcttttgtcgcttctgcgcctgcacctgttggcatctcggtctgcagaaattccaaaatctcattgcgtacacacagcttcatctcctgatccagggtactgtcactgtttgccagcacatgaaatctgagcacctcatctgccagttccttttgtacctttgcctgtactgttctctctgctgtactaaagatctgtccgatcagaattcccgctgccagcatggacagcaatgcaatgattctgttcctgttctgatttgaaaatttcatatgtatctcctccggtttcattttgatatccgaagtatgtaccaaaaacaggaagtttatacaaatttccgtaatttaagacgtagtgaagaaatccttcactacgcccttacttatgtctcaatgaatctgtcactgcagtcacctgattctcaatatgctgtcccatgatctcagatgctgtctctttattactcttctcgatcgcctcgatgatcgcctgatgctctctcaaaagctgcggataacattctttcttcttgagatactctactctgtagcggtacatctgttctctgaaattattcaaaagctgcatcagcctctgattgtctgtagaacgacagataatatcatgatatgccacatccgcctctgcgattctggtcacatcctcacttcccagagattcttcaaactccttcgccgctttcttcaacgcttcaagtccttcttcatccatccgctcacaggccagctgaactgcaagctcttccagtgcctttctgacttccagcacatcattcagacttttctccgtgatctctgcgacttctgccccgcgtcttgggatcatcagcacgagaccttccagctccagcttgcggatcgcctcccggatcggtgtgcggctcacccccagcttattggccagcttgatctccatcaaacgctctcccggctttaattctccgcgcaggatcgcctgcctgagtgtcttaaataccacatcccgaagcggaagatattcatccattgtcacttctaatttcggttccatcttatgtcctccttgcgccatgcacatttgtcacatatacctgttttgccagtgccttcctgcggatctgctcctgcgctctgcgcgctgccgcacggctttcaaaaatcccgaatacggtaggaccgctcccgctcatcatcgcattgagcgcacctgcttttttcatctcatccttgatcttttcaatgaccggatacatcccgatcgtgacatcctccagcacattgcccatatgagcggcaatctcggaaagagaccccgtctccagaccccggatgatcccatctatgtccggatgatccacgatttcttttgcatccagcgcctcatataccactttggtagaaacactgatcggcggttttgcgatcagcaccgtacacgccggaagtgcaggaagtgtggtcagctcctctccgattccctctgccagtaccgttcctctcataatacaatacggaacatctgctcccagacggacacctctttccatcagagatctctggcttaagcccaaatggaacatcttgttcatcccaaacaaaactgccgctgcattggagctccctcctgccatacctgccgctacgggaatgtgcttgttcaaaacaatcctgacgccgcccggaagcttgaattcttccatcagcatggctgccgccttatacgcgatattattttcatccgtcggcaaaaaatgcagatttgtctccacttctatacccggcagatcctttctcacgattacaacatcatcatacagataaacggactgcatgatcatccgcacatcatgatatccattttctcttcttcccagtacgtccagtcccagattgatcttggcaagtgcctttaattctatctgtttcatcctgtgtcctccgtttgtatcttgtatacatttgtgtttatagtatacccattttgccttcaaaaatcaacgatatatctctacattccgatctctttacaaataatgagcttatcgcccggtttgatttttccattttcgagatggttgatctgacggatactctcctcggtcgtcatatattgttttgccagcgtccacagatcatccccggattttaccatataccctacgatccccggttttttcgccagttcctcccggtctgtttcctccagagacacttctgtgatgacctgcatcggcacttcttttcttaaaaaaacatcaaaatccagaactgcctttacttctactgaatcactgccagtcatggtcactgagatctgttccactcggttggataactgataccgcacgtcttttggcatatccggacattccagcagataagaaaacggaaccattccctgccagtttccaaacggaagcgcatcatccgctttcagatacaaaaatgacacatgcaggattccttcgatcaggattcccccctgtttttccgctcttgtctccacatgttcgatctgcacacttcccgagctgtgacagatctgcagaacatcgtctttcagctccggaagcgacaggttttctacaatcttgcatttggactgattctgtaaaagcaattcttcatagaccgcctctcttgtctgatacgaaactttctgttccagagagtacagatcttccagaagattcagctcttcctcttcatacagattgatccgaacacttacggttccctcaatcccgatgatgcgcatctctccgtcctcatccatccgtacatctgccagcgtatcttccagcgcgtgctgcacatcataatacatcccttctgttgccccgctgcattcgattcgtccctcataaggaacactctgctccagccagtcggtctttccttcttctgagagatacatacagaaaatctgcagttctccccgcagaagcagttcatcctgtgctgcccgcacttccagcttccgccctgtaatatccgtcagaagcacctgaccgatgctctcttttgttccggggatcgtaatttcttctttgatgcggtatgtatcttttttcgcagtatgcagctttaagagattcaccggtttctgcttcttgtaaatagaagcactgctctccagatccaccgccgtctcttcttcaatgagagtttcacatccgacttccatttcaatcatcgcgcggatactgatctttctggagtgtaccagggtcgtaccgaactctacccggatattccggacaaaatactgggtgcgctcttctccctccgtgtacaccatttcttcaaacggaatcttgccatccagtactgccggcatcggctctccctgatccgtcacatacaaaatctggaaatacagctttccggaaatccgcacataattttccaccagcttgacatcctcgatcttgacagttccctgtcccttgatgatacgccgcacatcctgctttgcatccggaacattgtaatcttcgtccagataaaactggtcaaatgttttctttccttcctgattataacggattgttttctgtatcagctccataaactcctcctactcaaataaaatttctttttctgtcttttttaatttcaccaccacatacggataggttacgacatcctttgttttctctcctttttccggtcccagaagacttgtctggatccgcaccgttttttccccctccagaacggcatcaaccttaatctgatatccggtcttattctgcggtccgtagcttctggcagcgtaaatatcctgctccacggcatatgtcagcataaaaggatgggctttctcctgttccatccattcctttagttcttccgggatttctctttcactcatcagctgaaatgctgcacttttctcccctgtgatctccggctttttgcggatacagccgcagggcagccagatcgctgacagaatcatcatccacaaaaccacaattttgaatgttttattttttctttttctgttcaccctctgctccggagtccctctttccatttatcttattaacatttctgtctttttatgaccgcgaaacttgtatttcacaggatgctttagtataatctgtactagactaaaaagatgtcaggcatctttgcccccaacgtctaaaaaactaagagagaaggtttataacatgattcgttttatttgtgttgttgttttccttattctgtttcttattctgacaattccggtatttttcattgaatggctgatcggaaagttcaaccgcaatgcaagagactacagttgtcttcgaatcgtacagtggggattcaaagcaatcttaaaagtaaccggtgtacacacgaccgtgatcggattcgaaaatattccggacgagcccgtgctgtttatcggaaatcaccgcagtttctttgatattcttctgacgtactcccgctgtccgagactgaccggatatgtggcgaaaaaggagatggaaaaaattccgcttttatctacctggatgcgctttgtatactgcctgtttctggatcgcaagaatccaaaagagggactgaaaaccatccttcaggcgatcgattatgtgaagcagggaatttccatctgtattttccctgagggaacgagaaacaaaggcgaagagctcagtatgcttccttttaaagagggcgcttttaagattgccaccaaaacaggatgtgcgattgttccgatttccatgaacaacactgccgcgatctttgaaaatcagtttccaaggatcaaaaaggtcaatgttatcgtagagtatggaaaaccgatctatccgaaagatctggcgccggaggacaaaaaacacatcggcgcttacgtacagaatatcattcaggaaacgatcaataaaaatgcagaattgatctgatttaaaaaaggagattttttatgagagcagataatttaacattgctcacagatttatatgagctgaccatgatgcagggctattttgaaaaacagtctgcaaacgaaaccgtgatctttgatgtatttttccgggagaatccggtaaaaaacggctactccatcatggccggtctggaacaggtcatcgaatacatcaaaaatctgaatttttcttacgaagatgtagattacctgcggggactcggcattttcagtgaggactttctccactatctgagtggatttcatttcagcggaaatatttacgcgattccggaaggaagtgtgatcttcccgaaggagccaatcttaaaagtcatcgctccgatcatggaggcacagcttgtggagactgcgatcttgaatatcattaatcatcagagcctgatcgcgacaaaaacagcccgtgttgtccatgcggcacagggagacggtgtcatggaatttggtcttcgccgtgctcagggaccggatgccggactttatggagccagagccgctatgatcggcggatgtgtcggcacatctaatgtgcttgccggcaagatgtttgatgtcccgatcatgggaacccatgcccacagctggatcatgagttttccggacgagtacaccgcattcaaagcctatgccgaattatatccggacgcatgtacccttttggtggacacctatgacacgttaaaatccggagttccaaatgcgatccgcgtcttccgtgaaatgaaggacgccggtatccatccaaagagctacggcattcgtctggacagtggagatcttgcatacctgtccaaaaaagcacgtgtcatgctggatgccgcaggatttgaggatgccgtgatcgcagcttccaacgatctggatgagatgctgatcaatgatctgaagatccaaggtgcagcgatcacctcatggggagttggaacacatctgatcacctccaaggattgcccttccttcggtggagtttacaaactggctgccattgaaaaagacggcgaattccttccgaagatcaagatttcagaaaatacggaaaaaatcacgaatccgggaaacaaaaccatttatcgtgtatacgataaagagaccggaaagcttcgtgcggatctgatctgttttgcggacgagacctatgacacatccgaagaactgcttttattcgatccaaacgaaacctggaaaaagactcgtcttccgggcggaagctacacgatgcgtgagatgttacaaccaatcttcatccacggagaatgtgtctacacttctccttctgtcatggagatcgcagcatattgcaaacaggaaaaagagactctctgggatgagacaaaacgtctcttatatccacacaaagtttatgtggatttgtcccggaagctctatgacacaaaagcaaaactgttaaatgaagtaaataaataagataggagatcatcatgaaaattatcgtattagccggtggactcagtacagaacgcgacgtttctctcgcttctgctgccggaatctgtaacacattactggagaaaggacacgatgcatttcttctggatgtatttctcggccttgagaacgcacccgagaatctggaagacgtctttacactgcccggacatggtctggaaatcgcaaagaatatttccgaaacagagccggatcttgcagctgtaaaagcttcccgtccggatcagtctgactgcttcttcggtccgaatgtcatcgaactctgccgcctggcagatatgaccttcctcggacttcacggcggagaaggagaaaacggaaagctgcaggcttcatttgatctgctcggaatccgctacacaggacctgactcgcttggatgtgccgttgccatggataaaggactcaccaaacagatttttatggaagccggtgtggacacacctttcggagtctgcctgtataaagaagacagtgactgttccctggaatctctgggactttccttcccggtcgttgtaaagccatgctccggcggctccagcatcggagtatatattgtaaatacagaagacgaataccgtcaggcactgaaaaattctttccgttatgaaaacgaagtggtcatcgaaacttacatcaaaggccgcgaatttgcatgcggcgtgatcgatggaaaagcacttcctccgatcgaaatcattccaaaaagcggatggtttgactatgccaacaaatatcaggcaaatgcgactgaagaagtatgccctgctgatatcagcgaagagattgcagagcgcatgaaagctctcacagtccgcgctttccaggcattgaagctgaatgtatacagccgggctgactttatcctggacgcagacggcaatctgtactgcctggaaatgaatacccttccgggcatgacttctgcaagcctccttccaaaagaagcacttgcagacggaattgaatacggagatctgtgcgagctgatcatccagaaatccatggaagcaagatatcagtaagcaaatacaataaaggatggaacgtttatgaaaaacatgacattgaaagaaatcgccgttgcctgtggtggaatttattacggcgatgacgaaagttattataaagaagtttccagcgttgtgatcgacagccggaaagtagaaaaagactgtctgtttatcgccattcgcggtacaagagtagacggacacatgttcatcccgcagacgatccgggacggcgctctgtgtgcgctctctgaaaaacggattgaaaatgcctcttatccatacattctggtcacctcctgtgaacaggcattgaaggatattgccgagcactatcggaaaagccttaatctgaaagtcgtaggtgtcaccggaagtgtgggaaagaccagcaccaaagaaatgatcgcatctgtgcttggagaaaaatatgacgtattgaaaacagccggaaacttcaacaacgagatcgggctcccgcttacgatcttcaatatccgcgaagaacatgaggttgccgtgctggaacttggtatcagcaatttcggcgagatggaacggcttgcaaagattgcccgtcctgacatctgcgtcatcaccaatatcggagttgcccatctggagcatttaaagtccagagacggtattttgaaagccaaaacggagattttcctctatatgaacccgaacggttccattatcttaaacggggatgatgataaactctcaaccgttcaccctgcaaacggaatccagccggtcttctttggtctggatgacagccgggatttttacgcggatcaggtagaatcctgcggactgcgcggtaccaatgccgtcttccacacaccaaattcaaccttctctgcacacatctcgattccgggagaacatatggttctcaatgcacttgccggcattgccgcagggtatgcactgggaatgaacgacgaagagatcaaagccggcattgaagctttagttcctctggcaggacgtaacaatctgatcgagacagattcccttacgatcattgatgactgctacaatgccaatccggcttccacaaaagcatctctggatgttcttgcaaaggcagacactcgtcaggttgcagtccttggcgatatgtttgaactgggaccgacagaaaaacagatgcactatgaggtcggaaaatatgctgctgaccttggcatcgatatacttgtctgcatcggacagctctcagaacatatggcaaccggcgcaagtgaacagtgttccaaaacacaggtattttattttgaaacaaaagatgactttttcgaacaggcagaccgcattttaaatccaaaggatacagttcttgtcaaagcttccaatggtatgaagttttccgagatcgtcaatgtactaaaagagaggtaacatatggactaccagatgctcgttcttgatctggacggcactttgaccaattccagaaaagaacttacagaaccgacaaaacaggcactcatcgagattcaggaagaaggaaagaaagttgtacttgccagcggacgcccgatcaacggtatcgttcctctggcagaaaagctgaatctttccaaatacggcggatatatgctctccttcaatggagccaggatcactcagtgctccacaggagagatcgtctataatcgtactctgcctgccgatgtgatcgcgccgatctacgaaattacatccacctatccgggactggatattctgacttacgacggtgaccagattctgtccggtattgcttccaacgaatataccgaaaaagaatctttcatcaataaaatggaaatcgtacaggtaccggatttcgtatcccggctgacttttcctgtcaacaaactattgattgcaggagaaccgtctattctggaagaactgatgccgcatcttcagcagaagtttcataagctgctgaatatttaccggtctgagccgtttttcctggagatcatgccacagaatatcgacaaggcatactccctacaaaaactgctaaacagcatcggacttactgcagattctatgatctgctgcggagatggattcaatgacatttccatgatcgaatacgccggacttggcgttgccatggaaaatgcacagccgatcgtcaaagagactgccgattttatcacgaagtccaatgatgaagatgggattttacatgtgatcaatacatttttacggtaacctgattataaagactataaaagaaggggaagactgcacgttataaatgatgcagacttcccctttttactgtgcaagctgtttcagtcacagattttcctgcacaatcacattttaaatactacgaaaagagaataagtttactcttacactttggacaatgacctgacaccagcggtcgaaaaaaaattcgtcttccacacgccgggcaagtagaaacttcccagaaacatggtactaccacaaaacacactacaaagaacaccattggctccgcaaaataggaaatcggaaaataagaactgcccttgtacaatataataatatccagtatccagacaagcgccattaatctccatgcaacgagatttctttttctgtgttgtttttggagatctttcacataaaacattaaaatcccataaatctgtgtgcggaaaaatcggtacaatagaagattcatcacttcccccccattatgaaaattcctttcagttccactatcgttgggtttaattatgtcatgttcttcattttatatccatgctaagcttgttaaagattcgtaagtattttgtaaaacctcctgttttgcaaaacattgattacacactgtcctcatatttttaaaaaatattataacaaaacgaaatcagaaacggcaccagcgcagaacagatcactccgttaaacacagacagtaccacggtctcttcattcgtataccgtatcatcatcggcagtgtcgtatcctcactggttgcccctgccggagcgatacaggtataataattcagttttttcgaaatccatgggatgctgaaaaatgaaaatatctcccgcagcagattacttaaaaatgcgatacttcccgcctgtgctcccgccagattgccaatggtaaccccggaaagactgtaccatccaagtccactggcaatggctgtactctcaccaagcggcatccctgtcagaagtcctcccgcgattcctcctaaaatagagccaactacgattcccaggggaatcacaaaaattttaatatgatattccttgatcttactgacaatcccctgattgaaaccaatgctgattcctaccagaaacatcagcaggtataagatcatatctttattcgaagtaatccaggatacgatcacgttctcatccaatcctgtcattccgcaggcaatgccgccaagcagcgcaataattgccagatataccatgtctattttctcccctttccagtctttttattttctaaaaaacgtctggtcagaggatagaccagaagaaccgatcccacagacggcagcaaaaagaaaatcacactctgaattcccaatgtagaaagttcttccagaaagttttcccggcttcccagcagaactcccatggaaaaaatcagaagcagtgtgcacactacctgcaagatctgattccacctgtttaaattgcgcggcaataaaaatttgccggccagcactccaatacacatgatcacaataacatccatcgtttgtatccccgttctttctctccttttcaggtgtataaaaaacaccccattcgtacaaggatatcacaaaaaatatgttatcgtcaatgtcctataagtccagagtttccaggacttttttcaattccgcggcagactgtctcagtttcttgtgctctttttcatccaatggaatctcaagcacctgctctgctcctttctgggaaaccagagtcggaacactgatacaaagatcttccaatccatattcgccctccatcagactggaaactggcagaacggaattttcatcacggataatactttctgcaattctgcctactgccatggcgactccgtaataggtcgccccctttcgctcaatgatctcatatgcactgtcgcgaacttctttataaatccgctccattgccgcatcatgctcataatggccgcgcagctcacagaaatcatggatatcaattcccgcaacattcgcactgctccagacagccagctcactgtctccatgctctccgatgataaacgcatgaacacttctgctgtccacatccaggtgttcactcaacagatagcgaaatcttgcagaatccagaactgttccgcttccaaacacacgctcttttggataaccggaaatcttcaatgccgcatatgtcagaatatccaccgggtttgccacgatcagaaggtttccctcaaaatttcgttttgtaatctccggaataattgatttgaagatcgccacatttttgtgtactaaatccagtcttgtctctcctggtttctggtttgctcccgctgtaatgatgatcaaagcacagtcactgatatcatcataatcccctgcataaatcttcatggaatgaacaaacggtcttccatgactgaggtccatggcctcgccttctgccttctccttgttcgcatcgatcagaaccagctctgaaaacaaccccttctgtaccaggctgaacgccgtagatgctcctacaaatccacatcctatcactgctgctttttgaatattcatcatatcaatctccctcacttttatactaaaataataactattactgatttaaaccctaccataaaactaggaattatgcaattctttttcctgagtttcccagattgtgtcaaaaaaagaacaacatcccagttttgaaacctctctactagaatgttgtttttttctgaaattattcttttttaaccgattacctgatgattcagccattttttatttttcagccggatcgcataaatgattccacgtacagaccagtctgcaaacattccgatccataccgccatcggtcccattccgaatcctcttgcgagaatcattgcaagaagcactctgcaaaaccacatcgaaagtactgatacggtcattgtaaacttcacatctccagccgcacggaatccatatgccggaatgaaagaaaatacccatgcaacaggtttgacaatcgtgatccaggttaccatatgaatacaaagtcttgcactctccgcttccattcccccgaattttgtaattggatagacgagaatatacatcacaagacaggaaattacaattacgacctctgaaacaatactcagctttttcacataataaatcgcttcatccttacgaccggcgccgagactttctcccacaacggtcatcagcccgacaccaactccgatcgccaggattccattcagattttcaatcagatttgccattccctgagccgcaatggcagccgttcccatcagagaaactgtagactggattgccagctttccaaactggaacatactgttttcaattcctgaaggaattccgatattcaagattcttctgatctctttccactgcggacgaatcgtaaagtaatcgtacacggggatttccagatctggttttcgaagtttgtacataactacaaacatggcaaacattcttgcaagcagcgttgcacaggcagagcctgccacaccaagatgaagcccccatacaaaccagatattcagcacaatatttacaatattcgaacaaatcgagatcttcatcggaagactgctgttctcctgtgctctcagaatacaggaaccgtcatcgtacaatgcaataaatggataggagatggcagaaaagaaaaagtactgctttgcatttgtcatcacgttctcttcgacttctccgaagatcagccccagaatctggccattaaataaaaaacagatgattccaatcagagctgacagacaaaatgtgataaaaatcaactgtcttgccgcctccttcgcatgatcctgccttttacatcccagataatgcgagcagactaccgttccccctgacgccagtgcaaaaaatgcctgtacgatcagaatattgatagaatccaccagcgtcactgctgaaatggctgccgaaccaagactactgactaccagagtatccacggttcccataaaggaattcaaaagctgatcgattgcaagcggaatcaatagcaccgccattttcttgttatcaaatagatgcttttgtgtatccacttttttgccccctctttatgttctgtcaaatcattttgatcaaatacgttcttaggatacacccatagtttctattatgcaagaatagagaacaaatcttgcagatttatcttctcacgtcttctctatcctcttttatgaacatcaaaacaaatcctgccagcagcagtatcgccgcaatccagatcgtccgatcaccaatctgccggatgaataatgctcccatggccgctccaaccgcaaaaaccagaattacaaagtaataatgcatactttttttcttcagttcctgattgcccgttacctgatatttacagagcatttctgtcgcacttcgcatatttccgatacacatggtcgttgcacacggaatcccgtggaatttccggaaggcatttacctgcatcgcacaactgaatgacatcatcgcattggccggtacattcatactctgcggaaacaagcctaccaaaaacagcaatatgatctgaatgaccagcacaatctgtctccagtggattttttcgctttctttgcacagattctgaatgcggactgccacataaacaccactgataaacgccagcaacggaatcagataatgaagcgcaacgccccagtttccctctgcaagattctgtcccaaaagtacaatatttcctgtctgggcattggcaaatactttgcctctgcaattataagaataggcatcctgcaaaccaccggccaatgtaagaaatattgccagcggcatggattctgacatctgtccttttgctttcatttctaaacacctctttttttgcagatatcaaacagacaacatctgtcacaatatggtgctgtccttgcagtacagatttctcttccatgatatacaagacgatggcaaaagctgctgccctcctccggaggaatgatcttccacaaagccatctctacctttttcggctctttgatcccatctacaagtcccattcgattgaccagacggatacagtgtgtatctgtcacgatcgccggttttccgaatacatcgcccatgatcagattggcactttttcttccgactcccggaagttttaataatgcatcaaaatcatccggcacttctccatgatactcatcacgcagaatcctcatacaggcgctgatatctctcgctttgcttttcccaagcccgcaaggtcttacgattgcttcaatctcctgtggatctgcttctgccagtgcatttacatctggaaactttgcatacagatcttttacaacaatattgactctctcatctgtacattgtgctgccagacgcactcctaccagaagcttccacgcctcactgtggtcataatcgagcgtacaatccgcatccggatacgccgtgcgaagtcgttctatgatctccagtgcaagtttcttttttgtcatatgtaatcaactcctcttttactatggtaaacttttatttttttcacaatccgttttttatcatagcacaaaacagccgacataccaacaggtaggccgactgtttttaaattgattgtattctcttatctcacttgatcaatatagaatttaaacttatcggtgcgataatagcacttaaaattctcaataggaatctcttttccattcacaataccataagtaacacatctaaataatataataggagatccttcttttagttccagatactctgctatttcgtctttagcaagaatagcctccatcgttcttctcgcttttgtgatctttactttatacacattctgaatcgtctcatacaacgactcctgatcaaatgcatgcttctgcgtcagccccggaaaaattttctctggaagaaacgtaagcgtatagtttaaaggttctttatctgcatataagattcttccaatcatatacacattgtcatcaattgtaatttcaagtgctttcgccctttttacatttgctctcacaagttcagaaactactgtctttttactcggtgtcatacctaaacgaattacatcttctgtacaacttgtaatagcaaacagattattactgccttcatcggtttttacataggttccctttccctggactttataaagatatccctcagcaaccagctcttcaattgctttcctaattgtaattctgctgacctgataatcttccatcaactctcgttcactagggattggttcacctggcttaaactcttcgttttcaattttttcaacaatcgatttttttacaagataatacttaggtaatctatcatctatcatattacacctactatcaaccgcaccatttttgttgatctttctctttttcttatatctccattatattatggttatatttaaatgacaagcctaacactttgctttgaattctcggattttctctttcattgccggaatatcctcgtgcagtttcaaaattgtacttcctacaaacgccgcatctccaccggcctcttttaccagcttcacatcttctggagcatgaactcctaccccacagtaaatcggacggtcgatgccacaggctctcaaatgttctacgcagtctttcaatgtcggatattttgcattcttttcctgtgtcgcatacggttttgcttgaagatatacgaaaccattggactgttttgccatatcaatctccgcatccggcatatggaactgcacatagcaagatacctgtaatccagccgcaataatttcgtctttgactgtatcatctttaagtccaactaataaaatatccttcaaatcattatccaaacaaaagtctataaactcctgtgtcccaatttcttccactgtattttcatacgctaagacaagaatttttacatctggcagcttatttttaatcgctacaatagaatccatatatttttcatagtcatcacaagactccaacgctttttccattcttcctgcaatataatcgctttccagatatggatttctagatgggaaatctacttccatcattttacatccggcatctgcatattccattgccatattatagctcgcttcaattgtcgggtatccgtttgataaataacaaataatttccatggctattctcctctatatgctttcataaacaattctttaaattcttccacctccggaattaccggatttgtttttgtacatccgtctgcttttgcaagtgcggccatctcatccagtttttctgtaaatacggcttcatctgcaatcacttcttttaagcaagacggaatatgtaatgttcggtttaacccttcaaccgctgtatacaaattctctgcaccgattttttctgcgaaagtatcatatactttttttgctctttcatctgcttcattgtaacgaatgacatatggaagaagaattgcatctgcaagaccatgagaaatatgaaatactccacccaatgtatgcgccatggaatgtacgattccgagagaaacattggtaaatgccattcctgccaccattgatgcctgcagcatgatttctcttgctttcatatctgttccatctgcgcaggcttttggaagattttctataatatcgatcgctgcctgcgttgccagaatatcggacacatagtttgcccgattggataccagggcttccagtgcatgtgtcagagcgtccataccagtttctgctgtaatctttgcaggcatggaaaccgttacttccggatcacagatcgcaatatccggcatcatttccatatttccaagtccatgtttcagtccggtttcgttgtcagaaataacgatggatctggaaacctcacttgctgttccacttgtagatggaatgcagcagagtcttgctttttctctcagttttggaaattcatttggaggaagtacagattccattgtctttaattccgggtgttcatagaagatccacattgcttttgcagcatccattgctgatcctccgcctaaccctacgatcaggtccggaccaaatcccagcatttcctgcgcccctctcatcaccgtttcaaaagacggatctggctctacgccgctgatcaccattgtttctgcaccggcttcatggaaatatccttctacttttgcaagcattccacttctttccatactttttccgcctactacaatacttactttctctactttgattgttttaatatattccagacagccttctccaaacatcaattcagagcctgccagtttcattggtctcatcatgattcttttctcctttttattatgcgtttaatccatctaatacttttttcacaagatcataggaaatcggattgctgataatcccgccttctttcaggctggatccgatgatcgcaccatctgcaatctgcagctgatctttgatattctctgctttcacaccgcttcctgcaaataccggcacttttactacattttttactcgcttgatcagatccagcggtgtttcctctccaatctgggttcccgttacgataattccatccgctccgctgtccactgcttctttcgctgactgctctactgtaatatatggaagtaccatatgcgcatgtttcacctgcacatctgccagaactttgatgtcctcttttcccatcgctttgcgatattccatacatttttttgcgcatggattgatgactccatctgtaaaaatcaccgtatccacaaataccggaactcggataaaggatgcccctgtaattgctgcgatcgcgatatttgcctcgcaatcattgaatgctgcatccactccaaccggaatgtttactgcattttttacagccagcgttgctgccgtcagagctgccagctgtgctttattcagtagcgctgaaaacggggtgtctcccatattttctacgatcactgcatccactcctgctttttccagtgtgactgcatcctgtactgctctgtctaaaattttctgataatctccatcaaatcccgctgttgtcggaagtggcagacagtgtaccattccaatcactgtttctgaaccaattgaaaatttttctttactcatttttttctccctccattttcatatgataatgatagattccttccaaggctgttctgcaaagcagatcttccgcatctgttcgttcctgtcctgtcagtttttctttcagattttccaaaacggttaccatagtgagaatacatgttttgactcccatcagtcttccaagagtcagcatacaggatgattccatatcaattcctgtcacacccaattttttcacttcctcaaatgtctcggacatgtcccttccccactccagagaaaatctggaatcatgcatattgctgtagaatccgtccattgtacagttcagtccgttcagatatcgttttcccatatttacaaccgtttcattcattgcattgaccagatcgatatctgcaacagccggataactcaaatctacataagactgactggtaccttcccttctcatcgcagcaatcggaatcagaaagtgtcccagcatatcatcctgcatagacatgaccgttcccattctcacagccacttccattcctacctcatacatttcttccatggcgatcgcagcagacggtgcgccgattcctgtcgatgtcacagttacttcgattcctttgtaagttcccgtatatgtattaaactctcgcataaacgccacttttttcggattttccaaatactgttttacaacttctactctccacggatctccagaaaacaacacatattttgcaacagtttcctgatccgcacccatatataatgtgctcatagctttttctcctcttttcaaaatatgaacgcccagacactactcaaatgtttttgctttctctaataactgttcttctgtcggcgcgtttgtgcagcatccttctgactgcagaataaagtaggaaagtgttcctccaagtctgcagcactcttctgctttatatcccttgagatatccatagatgaatcctgccatataggcatctccggatcctgttgcatctaccacatgatccactttgcagattccgatcttttcctgacggatgatatctccttcccggatataacagagacttccatccttgccgagtgtagttacgataatttccacttcgccaatatcaaacagttccgtaatatcttcaaatccataaattttttcgatgatctcccgctctacttcgtttgtaaaaataattttacttccggtaagaagtcgttttaaaaactcctccgggaatgcgtcgaaatcatctttcattccaaatacaatcggaacatggtgcttctgacatttttcaaaaaattcttcattgtcctgtctcgatgcaactgtgatcacacccagttttgtatcttcaaacagttcatctggaagcggttttgcatattttccgtccattgcacccggataaaaaatcgtaatatgatcattgtgattatcctggatcaaataacagacactggttgcttcctccggcaattctgtaatcccatccaatgggacatttccctcttccagaaattttttaaatccgttgctctcataatctcccccgacacgaagcaccggcttcgcacacattcccagtctgcacagcgcataggcaatattcacagaacatcctccgtaaaaaatctgtgcattggactgattcgtaaccagagacgtaaatccgacttttgccggcgtatcaatcttaataatgtgatccatgctcacatagccgcttgtcaatacatctgttttcattgccttcctcctataacttaccttcatccagcatcgtaaataacgtattcatgtcaactacatctcccagatatttatcaatatctgtcaaatgaacctcattaacaacctctgaatttgttgccacacattctttaactacatatggattatagtctaaataaaatgcatctgttaccgttgcacgaatgcagcagtttgttttcgttcctacgataatcacattctctactccattttcccgcaaaaccagatccaaatctgttccaaaaaatccactgtatctcctcttctgaatgacataatctttttcttcatctaccggaagcattgaatcgatctccactccaaaggtgccttcgatgcaatttggcctcattgcctgggcttttctgtccacttttccttttcgattgcaatgttgcataaatacgaccagtacccctttttcccggcatttatccagcactttccggatttgtggtaagattcccctgttttgtggataatagacgaggccctccggatctgtgaaatcacgaaccatgtctacaatgatcaatgctgatttactcatgtttcacactcctattcaaacttatatcctcttacttttacatttttatatttcatataagataccactgcaagtacagcaaccatgataatatatggtatcgtatcgaacattcctgctgccggacctgcatatacacttaaatttacagaaagtgatcttgctattccaaataagattgcatacagtgaagatggtaccggacgaccctgaccacaataaattgctgcaatggcgataaatccacgtcctgctgtcatatcattggtaaacatacacattctttccaaagacagattaataccagcaagcgcacaacagaatgccccaattaatactgctgcatatttatatctttttgttttgattcccaggctgattgctgagtcttcattctcgcctactactcgcacatacacaccaaattttgtcttatacatcagcactgctacaagcgcaattccaataaacgccaaatatgtgatcagtggatgcccactcaaaatatttccaattaccggaatatcttggatgatcggaatattaatcttaaaatctgctacgctgacattttgcagactgatattggcaagttccatcatcttcaaaacaaattttgcaattgcaggaacaatcaagttaattccaagaccgattacgatgacatttcctttgcagctgatccctaaaatcgaaaacagaagtccccaaagtaatgttgtcacaattgcagcgataatcgcaactgcaacacttcctgtcatgtattcaaccagaacagatacaaacgcaccatttaacatcataccttccaaagcaatatttaacacatttgccttatatgcgaaaattccgccgatcacgcagagaataataggcgcactgtgatacacggtatcatataaaatactatttaataattccattatgctgcctcctttttccctttcttgaatctgtcaaacaaatttgtattatttccgacaaactttaccgctaggaataagataatcattccctggatgattgcaataatttcttttggcacagtcgtatataaattaatgctgtcacttcctgtcttcaaagctgcataaaatactgccgctataaaaataccgatcggcgaatgcccacccagaagagcgatcaacataccatcccagccaagacccgggtttgccgaaaaactaagtgtatacttaaactgatcacttaacatccatcctgctcccgcaattcctgccagtgcaccactgatcagcatcataataataatttttcttccaacgttcatccctgtagcttctgcaaactctggattttttccaattgctgtaatttcatatcccaacttggatttattcatcaaaaaatacattacaatcaaaatgatcacagctattacaaaaaacattgtcattctggatgttccaattctctgaaacattgcagcatcttgtactgttggtgttgccacataaccggcactcttatctctaaaaattcctgttgtcagaaattccagtgtttttgccattgcatagtttaacatcagtgttacaaccatctcgttcacattacattttgccttcaaaattgcgggaatcaatgcaaataacataccgcacaaaattgcaactacaaaacaaactactttacttaaaaatggattggaaatcggaagatatgctccgacaattcctgcaaaaaatccacctaagagcatctgtccttctacacccatattgtaaatatttgctttaaaagtaattgcaatcgcaagacctgttaaaatcagcggcgctgcataatgtaaggtattcataaaccctttgcttgaaagcaaagattttcgaatcaaaatcccatatgtctcaattggattttctccaattgcaaatataatgaccgcgccgattatgaatgctaatatgacaggaaaaacagagtttaagattgtttttaccagattctcttttcttttcatctctcgcccctccttacttggaaattcctgccataagaagcccaattgctgctgttgatacttcttttggacaaacttctccagaaattttgcctttatacattacgataaccctgtcagacagactcataatttctgacagttcactagataccaaaataacagtatttccttcatcacggaatttcaaaatctgtttatggataaactctatcgatccaatatccacacctcgtgttggctgacatgccagcaacacctttggatgtgctgataattctcgggctatgatcaccttttgtgcatttcctccggaaagacttccaatcggtccattcacatctcccagacggatatcaaattctttgataaaagaatctctcttctcattaatttttttcctgttgtacagtccccgcttacagatatcttttgccccgtgatagcctgcaatacaattatctgaaacactcatttcacggcacagtccctgtgcataacgatcttctggaatgattccaagcccggcttttctcaacttttcaggccaccagttcgtcacattttgtccgtcaaatataatctcgccttttgtagactccatcaaaccagtaatcagttttaccaactctgactgaccatttccttctactcctgcaactccaaggatttctcctttatgtactttaaacgacacatctgaaacaacttctttcccatagtcattgacagttgttaaatgctttgcctcatacatgatgtctgtttttattgtctgtttacgtgtattacttactgtaagcacaacatctcttcctaccatcatttgcgcaagttcttgttcatttgtatcttttttcaatacatttccaatcaccttgccctgcttaatgactgtaatactatctgcaagttccataacctctctgagtttatgagtgattacaataatggtttttccttgctctttcaactgttttaacgtcaccatcaattcatcgacttcttgaggtgttaacaccgccgtaggttcatctaaaatcaaaatatccacatttctgtataacattttcagtatttctacccgctgccgtcctcctacagaaatatcttcaatcttatctgtcgcatttaattcaaaatgattttcttcaattaatttttcaatacgcctgatttcttctttctgatccacaaatggtgtgtttttctttttgatttctgctcctaataaaatattctcatataccgtcaggctgggcaccagcttaaaatgctggtgcaccattccaatcccatttgcaatggcatcaatcggactgttcatagttacttcttttccccttataaggatcttaccgcttgttggctgaagcaaaccatagagcatgttcatcattgtactttttcctgctccattttcccctacaatacatttaatttcctgttcttttacatccagattgatatgatcgtttgcagtaaaatccccaaattttttggtcagatcaatcgtttgtatcatactgttcatattgttgctccttttctgatcaagagtcttacttaatggtcacattcggacattttgccggatcaaatttttctccgctctgtgcatttgttacctgaatggttccatcttcaattttcttttcaatatcagcaagttctgtcttaatttcttcccattttgcttttccgctttcctgcacatgtttgctgatttcactcaaatctgtaatagaagctgcgcctgaagccaatgaatagctctgtacacgatccatttctgcaatttttcccgctactgcttcttttacgatttcgtataccggtacttctgtatttttaattacgcttgtcagaatgtatcccggctgctgatcgtctttattcgcatctacctgaattgcaagttttccttcttcttttgctttagaagctgctccatctcccacggaacctgctactgaaaatacaacatttgcaccctgattatagtatgtacctgctactgtactaccagttgcggaatccgcaaatcctgcatcatattttgcataataatcgtaatttactccaagtttctgtgcttcatagttgattccttccagatatccataagaaaatactgtgattccgtttgaatttgttcctccaataaatccaaccgatcttcctccattatctgccggtgtgaagttgtatccatctgttccaaataacgtctctgcattttcatttacaagtgttgtcagagctcctgcgacaaaagaagcctgatgtacatcgaataaaacactgatcacattatcatgaattggtttgccatcttcgtcctggtttggattgtcatttacacagacaaaagtggtttccggatacatttctgcaatcggagctgcgcctcctgttccctggatcaaggcttcaaaatcatattccagattgaagatcacattgtatccatcatctgccagagactccagagcctgaggaactcctgttgtcggttctacaactttgtactctatacctaattcttcagctgctttttttgccccttttacagcagactgattgtagccgttatcattctgtcctgccgatgaacaaatgattgccaccttcacatcactgctttttccccccttttcttccttatctcccccacatgctgtaaggcttcctaccattaccgttccgaccattaatacgctcaatacttttttccaacgctttttcattttcatttcctccttttgatattttaatgttgtaatgttatgtcgtcataaccagttgttggttttataatacatcgaacctgatattttgtaaaggatattgtttatttttgtttgaatacacaaagttgttcttatttttttatgtactttgcacaatctcttttgttttcatttttctcacttatcatataaaaaacctccaaatcatttacagatttggaggcctgattctaaccgtcttaatttattcagcacctgtattcactttttcaaaacataaattctgttctacaatatcatcaatcgaaaacaatttcgtttttgttgaatcatttatgtttcttctatgttgttgacctcataaattatcaaaatactgatttacttgcctgtctctgaattgacctgtatactgtcatcagcatacaaaaaggaaaaggtctcagagcaccctcctagcaagttgtgtactctgagaccctggtcactaaaccatggttattatatcagattattcacttgtcctcaaggaggattttggtgttttttgttgagagcagtgtgaccacccatatgtgccccatctgtcaggctacgcttcgttaccgggattcacgcccacgcatccgtagaaaggaaggcggtttaaaagatcagttgatcattcggcggttttattgtaagaactgccactcttatcataatgaacttccggattgtcttgttccgtacaagcattacgaaacagaagtgatctccggggtgctggatggcgttgtacagccggaagacttagattctgaagactacccgtcctgcgctaccatgctccgctggctgcaatggttctgcgaaaatcttgaacgtatcaacggatatttaaggacgatcagggagttcctgctgggttataacgaagagaggatttcccttggttcactgctcgattctttcagaaaccaatatcaaaactggttagaaatcatcttgcgtcagatttacaacagcgggggatttttagtcccgatctgctggtaaggcttatgcacctactttgcatcgtctgtcgcggtaccaacgggtatagtggtctcaaaaggaggtcactattttatgaatacaagaataaacaaacaacaatggcaggaagaagaagccctcaggcgtttccaattgatttctccgcttctccaggctgatctggatgatgcaaaacggatccagctgcgcaaaaagattgcagaggagaatcatatatcggtccgttccctttaccgttatgaaaaagcgttttcggaaaggcagtttacagggctaaagccggctgaccgggagaaacaccgctcacaaaaactccctgaaaactttgagtttctgttggagcaggcaatccagctacgcaaggaggttcccgagcggtcggttgcccagatcatctacatcctggaaacggaagggcttgcagcacccggtgctttaaagcgttctactttggaacgccatatctacaaggccggttacggccaaaagcagatgcagatgtaccaggatgcaaggaacagttcttccaaacgtttctgcaaaccacaccgcatgatgctgatccaggcggatatcaagtatggtcccaagcttccgattggaagaaatggagccaaggtacagacttacctgtcctcggcaatcgatgaccactccagataccttttatcttcccggttctatgataatcaggaagaagcaatcattgaagatacgttccatcaggcggtttcccggtatggaaccttcgatgcctgttactttgataatgggacacagtatatcgcaaaacagatccggtcttcccttgcaaggttgggcatccgtgtgatgtatgcaaaaccaagatccggtaaaagcaaagggaagatcgagaagttccatcaggtagtagatgcttttatccgggaatcaaagctgaaaaacatcaaaacactggaggaactgaaccgcctatgggccatctatctggatgagtattaccacaagaaaaagcatgatggcatcgcagaatactatgaaagccttggcgctgccgttccggaagaagggatctcaccgcttcaggaatggaaccgggacagccgcccactgacttttttggatacagccgttgtagccgaagctttcctgcatcatgagcagaggaaagtggataaaggtgcctgtatcagtttccgcgggcaaaggtatgaaaccaagccggccttgatcgggtatacggtagaaatctcctatgatccggcaaatcctgagatcatcaccatttctcatcccggatttgaaccttttcaggcaatgcctgtaaagattggggcgtattgcgatagacacgctacgctcccagctgctatgcaggaacaaaaaccgacaacttcccgttttctggatgctttggaaacgaagcatacccagagcaggcgccaaatggcagatgcgatttcatttgcttcctacaggaaggaggtgaatggctaatgtatgaatcattctttggcatggaacataccccctttgtccgggacgtccctcccgaaaaactgtttgaatccaatgctttccgggaaactctcggtcgtctggcttatgtggcggaccgccagatgtttgctgttgtaacagctgattcagggtgtggaaagtcaacgcttatccgccggttttattcggaacttccaaaagaggattacatcatcctttatctgtcagactcaaaactgaccccaaggtggttctataaaggtttgctggatcagttggggctggaatcccgtttctaccgcggtgattcaaagcgtcagctgcaacaggagatcgaggtaatccggggcgtacagcgtaaaaaagttgtctgcatcctggatgaagcccacctgttagagaaggagacgctggaagaattccgctttttgctcaattaccggtttgattccatgagtcccatggcgcttgttttagttgggcagacagaactgtgggaaaataaactaaagctacagcggtatgccgccatccggcagcgcattgacatgtactgtacgctgcctcatcttgaccgttctgaaacagaacaatatatcgcaagccacatggattactccggatgcgggcaggaaatatttacaaccaaggcattggatgagatccataaggcatctgcaggaatcccacggatgatcaaccgtgtctgtgaaaaagctttgatgtatgcgtttcaaaatcagaaacgattgatcgatgattatatgatcaagttcgttgtggaacacgagatgcttgggatggtaacttcataaagcaggtaccgcctggaaacaggcggtattgcctaactgactggtgacagaaagttaagcaagtgagcgtcaactgatgtgagcaatctggtgacagctcatgaaatcactaacacttctatttccgcacaataggtatttctcatctatacgtttaaatacataccagttattatcttctataacaagaataatattagaaacggtatttccgatatttaaataaattattgcaaggccaagcacttctaccaatgtccctaaaaccacccaacttattatattgatatttaccatgtttgcagccacaaaaatcaatattaccgtagaagtcataatggtcaagaatactttttttcctcgacccaccaatatgccttttcaaacctccacttatttttcaattttttcaatacaaaagaagctactaatgttaaaggcaaaaggacaacactagcaaaaaccaatccaatatcaataataaaaatataatttattaccccgaatactgcaaatagaattagatatataaatccaaatttcttcgattcttctttttggtccatcaatatcgcctcaattttagatgcatttaacaactgtatataacctgctgcaataaaaagcaaaacgacacttgtgccaataactatccaaacattatttccatcgaattctttaaatatctcaattatttctttaagtgcttccatctttcgtttgcctactttccgtacaaaatcattttcaaatactctctagacctttacacattgtttcccgttctgttctacaatgtttttaacaactgtactaatgtatgtggctcgttcacagcactcttggattctctggtactgaacattttgaaattattttcgtcctgataaaacttcatcaaaggttttttattctccgcttccaaaaagataaccatgccccctgcctgatactgcaaatcctttacctggtcaattgcaagctccagcagttcttttcctgttatacggttattcagcccttctgtataattctttcctatctgggcaatcagatatgctgatagattgtaagaatggctcgcctcatccaattcactaactcttgagatttttcttctaaccgtaccactaaaattatctgcatttacagtaattggttttactgcaatggtaaaatatcccagtaattctccatcatcacttgaaattacaagatatgtaaccgattgattcttcttcgtgaattcaatcgctctctcttttaaaaactgttccacatccggatttatagggcaagaaaaatcggagaagattcgaagtaatacatcctctccgatttcagcatccttgctttctgccaagtattcacgaatgtttacagtcgaaaatttactaatttcgtacattcctcttattcctcttggccattaattttctcagttcttcaggtccgcttattttatctacactgaccttgattggagtcgtaaccgtgttggcagattcttcaattgcattcgcaaatatttctgcctgcttttcaccatatacgacaaaatttttagtaatacttgaagtcgccatgtgatacacctcccttatcagtatgccttctttcactttatcctatccttcacttatattctattccttactaaaaaattctgcaatactccaaaacattaaaaagtaataaactttttgccctttaactggggatggagcatatgccggtacactacctttttatttcctgctaaaaataaccaatatcacaatatccactcccatcgccactgctgccacacaccatgccgcattgactccgttccattcggtcagcactcccagaagattcataataataaatccggcaacactctgaatcgtactgaagatcgaactgtaagcagatcttgtctcactttctatacaatcgcacatccaggttgaagtggcagattgttccacaccgaatccaaattctactaatcctgctccaatcacaaaaaccggaaaagagggtaatacaaaaagaagtacaaaccctaaaatactaataataattcctgcaatggatgttcctaaattactgatcttccgggtaaaaatgcttactgcataattccccaacatcagaagtaccataaataccagcaagaaaaatgccagatatttggtctcgatatggatcacctctgttgcataaatctgccagaataagacaaatgctacaaaaggaacatggcacacgatcgtccgcaaagataacaaaagtaatttttcttctttaatgaacgactttgcctgaagctgcagcatccggaatatattattcccctttacccgtccgtaattatcctgtccgaacagcaatgcaacaattcctgctccaattgagatacatcccgccgttatgatcggcagccgctgattgacgccaaccagaaaataggatgcgagcgaggcagctatcgcaaaaaatctgactcctgcctgaagttttggcaatatttgatttctttcttcatatataccatgtctgatcatctgatctaccagccatgctgacggagctccggaaatcagcgccagtcctagcgccataaaaaccatagcaggaagaaacgtccagaaatttactgcaaacgcatacagcaaaatccccgttccccacacaataaatccataccccataattttcttcctgccgatcttatccgagattgttcccgtaggataatcaaatacagcctgcaaaatctgttgaatactgaacaaatttgaaatctgagcaatcgataaatcctgagcacgcataaatgcaacatacgtagcaccaaaaagcttgtctgccaattcatacagagacatcatactcacatacagatttcgggtttcacgaaattctttgtcactatggtctgatccagtcatccctcatccccctcacatattttttatcttctaatctatcacattctgatattttttcaatacttcaggggatgatatcacttttttcctatgctacaacattcgtatctctgaaatactgcggtgtcatacctgtatactttttaaacgtccggtaatagtgtgacaaatcataaaaactcaatctccgtgcgatttctcctaccggtacgcccgactggagcatcatcttcgattcttcaatttttctctgattgacatattcattaatggatatccctacttcctccttaaatctgcgacgaagagcactttctgacaaatagaactgctttgcaagctctgtaactttaatcgtgtcataaattttcaagttaatatgttgcaggatacatcggatcagtgatgttcttgcctgattggaaacaccatgaagctcttttgtaaaatgtatgattgcagtgtctctcgttcccatttctgcaagaccactttttaataattccaggtctccctgactgacaagattcatgatcttattttcataataaaatgtatactgctctacccggaatgtctcatatgctgtatcttctgctgatttccacaccaactccagttgattttcagtcacttgtttatgcagctcttcagaataaatctcttccaaattcatatcaaacaaaaatccaagaagaatcagataatcccgaatatctcccagtggatataccggaagtgaagagtaatattcccagcattctttttctgacaaaattttcttattttccggagtcagattgtcatatacatgagaaaactctgtactggtaacattatttattcgaaacgctccaattacaattctgacatcctgataccataagcacagaaaaatttcatttaacatcccgctgtaaaaccgtacaacctcatctgaaatatttttttctttaaattcatatgaaatcggatgcttataaattgatttgtagcttttcaaaacccgatttgtctctctttccaatatccatatgggcattttcaacatcacatgtaacgatttgattttctttaaatcctgttcactcaaatctatatatccctctcctctttcattttctattcatacggtactttccttcattattacataatcagagttgttttaccacgctgctttttaaacttccaacataattcagaaatactgtcaccttcttcagcattctcaacaagacccacaagatctcatttttaaataatcatgcgggtctttgttggtgtattattttgatatgaaacacatatcacttaataattttctgtattgtagtttcctttagttcattttcaaaatgctcctgcattttgaggtacgtttctctcaaacgacatgcctctgttgcaaaacagctgcaatatcggtcatcctcaaggcatcgattccatttcatggttttttccatggtatccataatctcgaataaattaatctgttctgtctctttttgcaaaatatacccgccatgaattcccgtatttatggccaaaatccccgcatgattcaatttcctcataatcttataaataaaaggctgtgaaattttcagattctctgacaactctctggatgacactattctccgctgctttgccatatagatgactatacgaatggcatagtctgttgcaatattcaattgcatcgtattcctcctttcaaaaggctgaacagtaatagtgtttttttcgctgtcatatttttccaccatcatgtctttcgcctctttctttataatacatactaaaccggcacgctacactttcacccgaaaggagtcagttcttacatgcatttctcaatttatacattgtcggacgaagagattttttcaatccttttttctttaggtcttctcaaaaacggtcaacggcgtataattaaaattaaccgcagcggttaaggaggaagaagatcatgaacaaaaaattttttgcactgcctatccagaaacaggaggcgattctcaatgcgggattttgtgtattctcacagaactcttataagaagagccctacaagtgaaattgccgatgctgcaggtatcagtaaatccctgttgtttcactatttttacaacaaaagagaactgtatctttttctatgggaaaaatgtgcgcagattaccatggaagctctggaaaaaagcggctgttatgagcagactgatctgttcgattccatgaatttaggtcttcaggcaaagctggagatcatgcgccgatatccgcatatgggtacatttgtaatgaaagcatattatgaaaaagatccggatgtacgccctgcgattcaggaaagcattgtaaaatacgctgattttaagacaaataccgtcctgtttaatctgaatccggaacattttattgaaggacttgatctggaaatgatgtatctcgatatgctatgggcatctgaaggatatatctgggaaaagctgcagcatgatcatatcaatgttgatgagatcgaagcggattttataaaactgattgatttctggaaatccatttacttgcggaaagagaggtaactttatgaatgcgatccaactatcaaatctaaccaaatattacggaaaatccagggggatcttaaatttaaacctggatgtaaaagaaggggaattctttggctttatcggtccaaacggcgccggtaaatccaccacgatacgtacactgctcggcctgatcacgccctcatccggtcaggcaaagatttttgatgagacaatccggaagcgcaatccccaaattcgttcccacatcggctacctgccttctgaggcggtgttctaccgtggaatgaaagtcaaagacctgttaaaattatctgctgatcttcatcacaaaaactgttctgcggaaagagaaatactatgcagacgcctgcagctggatgtcaaccggaaggtcgatgaattatctttcggtaatcgaaaaaaagtagcaatcgtatctgcactccaacatcagccaaagcttctgatcttagatgaaccgacaagtggtctggatcctctgatgcagagggagtttttccatattatccgggagcgcaatgaacagggcgctaccgtatttctttccagccatgtcctctcagaaattcaacggaattgtacgagagccgcgatcatccgagaagggcggatcattgcctgtgaccgtgtggaggcgctttctaaaacaaatgccaagcggatcagcgtacagggacaggtatcgcttgattctctggaagaaattcgtgacctgaaggaaaatgacggtgttttcagctttctttacggtggagatatccatcggctccttgaaacactctcagccggaacgatcaccgatctttccatttcggaccctgatctggatgaaatttttctgcactactatgaaaacggaggtgaacaggtatgattctaatcaagcatgaattaaaacagggatggaaatcacttgccgtctggactgcttctatcggattttttattatcatctgtgtgttcctgtatccggaaatgaagggagaaatggaagacatgaacgaaatgttctcctctatgggagcctttagttcagcatttggtatggatcgtctgaatttcggcactctgatcggtttctacgcaacagaatgtggcaatattttaggactgggcggtgcattctttgcatctcttattgcagtcagcagccttgccaaagaggagaaagaacacaccgcagaatttttattcgcacacccgatcagcagaaaaaagattctcacggaaaaactgacctctgtcttgttccagcttctgatattgaatgtgatcgtgttcctgttttccgttggatccatttcactgatcggtgaagaaatactctggaaagaaatctgcctgctgcatcttgcctattttctgatccagattgagcttgccggcatctgttttggaatctccgcattcctgcgccgcagcggactcggcatcggacttggcattgccacaatgatgtatttcctgaacattattgccaatatctccgatcaggcaaaatttctgaaatatatcaccccgtttggttatgcaaacggagcagatattgttgaaaacggcagtctggataccgatatggttttgacggggatgctgtttgctgtaatcgggattttaaccgcttattggaagtacagcagaaaagatattcaggcataaaaaacacagccttttgagttccttttcctgtatgataatccattttaccaccgaagttcataattctccagaagagatttaccttatggcgttcttcatggatcttacatactcacctatgtaatccggcgcctcttttccatgcttttccaaaagcttgataatcgcggagcctacaatggctccatccgagatatctgccattttctttgcctgctcaggcgtggaaatgccgaacccgattgcacagggtacatccgtattttctcttatcacttttacgatcgaatccaaatccgtcttgatctcacttctcacacctgtcaccccgagactggaaacgatataaatgaaaccttccgcttcttttgcgatcattgcaatcctgtttttagaggttggagcaattaaagatatcagatctacaccatactgactgcagatcgaatgaaattcttctttctcctcaaagggcagatcaggaagaatcaagccaccaatctcaatctctcgacacgcagaaataaacttttgggcaccgtaggagaaaactacattggcataagtcataaaaaccattggcactgttacatctttccgcaactcttttacgaatgcaaatattttatccgtagtgatccctccatttaatgctcttaaatttgccccctgaatgacggaaccttctgcggtaggatcagagaacggtatgccaagttcgatgagatctgcaccattctctgcggcagcccggacagccctggctgttgtttccagatccggatcgccacaagtaataaaggcgataaaagcctttcccttttcaaatgcttttttaatgttactcataaatatcctcccctctgtaacgggcaatcgtggcgcagtccttatcacctctgcctgaaacagtaatcacaatgattttattcgaatccattgccggtgcaattttcatcgcgtgagcaactgcatgcgccgattcgattgccggaataatgccttccgtctttgcaagatattcaaatgcatttactgcctcatcatccgtgaccggcacatattcggctcttccgatgtcatgcagataagagtgttcaggacctaccccgggataatccaggccggcggaaatggagtaaacaggagcgatctgaccgtactgatcctggcaaaagtaagacttcattccatgaaaaataccaagtctgccggttgcaatcgtggctgctgtttccaatgtatcaacgccccttcctgccgcttcacagccgatcagtctgacattctcatcttcaataaagtgataaaaactgccaatcgcattggaaccaccgcctacacaggctatcaccgcatccggcaatcttccttctttgacaagcatctgatctttgatttctttggagatcactgcctgaaaatcacgcacgatcgtcggaaacggatgcggtcccatgactgagccgagacaataatgcgtatctgaaatacgggacgtccattcacgcattgcttcagaaaccgcatctttcagagttgccgtccctgttttaaccggaatcacatctgctccgagcagtctcatacgatatacatttagcgcctggcgaacggtatcttcttcgcccataaacaccacgcactccatccccataagggctgcagcagttgcagttgcaacaccatgctgacctgctccggtttcagcgatcagccttgtttttcccatcttttttgcaagcagagcctgccccagtacgttgttgattttatgcgcaccggtatgattgagatcctcacgtttgagatatattttggcgccgccaaggtctttggtcattttctctgcatagtacaatctggatggtctgcctgcgtattcattcaaaagttctgtaagctcccggttaaattcgggatcgtttttatagttgttatatgcttcttccagttcaatcactgcattcatcaatgtttcgggaatatactgtccaccgtgaatcccgaagcgtccgtttggattcgtcataatcgttcttcctttctgacagcagcaacaaatgccgccattttcgttttatctttgagcccatctgtctcaatgcctgaactgacatcgaccgcatacgggtttaattgtctcaccgcattttctacattatcaatggaaagtccgccagcgaggaaatacggtctttgtatgttttgtatcttcttccagtcaaatacagttcctgtcccttcgccggaatcaagcagaatataatctgctaagcaggattcagcatttgtaatatcttctgacttttttatacaaaaagccttgatgatcggtttatccgtaagcgccctcagttgattgatctcattttcatcttcaacgccatgaagctgggcaatatcaataattcctttatttaagaaagctgcaatccgttcaggcacttcatttacaaataccccaaccgcttgaatgtcaggagcaagcagtttttttaattctgctgcttcttcaggcgttacatatcgtctgcttttcggtgcaaacacaaaaccaatatattctggtttcaattcattggctgcatctatatcacaaggacgaaacaacccacagagcttcatttttgtcatagcacacctctcaattcggcaagcttggctgctttattctctgctctcataagtgtttctccaattaaaacagcatccgcaccgatctcacagagttttcttacatcttcgacactgcttacaccactttcagaaacaaacagtacatccggcgggattagctttctgaatctgcggctattgccggtgtccaccgagaaatctttgagattgcgattgttgactcctatcatacgtgccccggcatttaatgccattctcacttcgcattcatcgtgtgtctccaccaaagcagaaagtcccagctcatcgcaaatactgatatattcttttatttgttcctcactcaatatagagcagatcaaaagcaccgctgatgcgcctaacatctttgccttgtagatcatgtactcatccaccgtaaagtccttgcgcagacagggaacagaaaccgcgccggcaatttttttcagatactcgtcacttccgagaaaccattttggttcggtcagtaccgagatgcagtctgcacctgccgcttcatagtcctttgcaatctgcagatatggaaactcctgagcgatgatccctttggatggagaggcttttttgcactcgcagataaaagaaagtcccggttttttgattgctttttcaaatgtaaaattgcctttcggcagggataacgcctgctgtttcaactcttcaagtgatattcttaactttgcctgcacggtgcgctctcgggcgcagccggcaagctgatctaaaatcgtcatactcacacctccgaacggttgctgacttcaatgagcttattcagtgtttccagcgccttacccgagtcaatgatttctgcggcaagtgcgataccctctttcatactgtctgattttccaccaatgtaaagtgccgcgccggcatttaaaagcacagcatttctcttgtaacctctttctccatttagaatggcaagggtaatttttgcgttttcttcaggcgcaccacccttcaaatcttctttcgtacatctttcgaacccgaaatcttccggtgtgatcactgaagatttgaaccagccgtctcgaatctcacatatcgtggttggtgcgctcatggagatttcgtccagcttatcctgcccatacacaaccatcccgcgcctgataccaagctgaatcaatacctgtgccaatggttccacaagatactcgtcatacacaccgagaagctgcatagaaggtgtccccggattggtaagagggccgaggatgttgaacaccgtacggaatcccaactccttgcggattgctcccacatgtttcattgaagtatgatatttctgtgcgaagaaaaaacacattcccacttcatccaaaagttccaggcacctctcagggctctgctgaatgtttacgccgagggcttccagacaatctgccgttccgcattgtgaggatgctgcacggtttccatgtttggccactttcatacctcctgcagcggcaaccagagctgatgtagtggaaatattgaagctgtgcgcattatcaccaccggttcctacaatttcaaaaagatccattcctgtttcgaccttcatggcatgcgctctcatagcggccgcacatccggcaatttcatcggttgtttctgctctggcacttttggttgacaaagctgcaagaaatgcagcgttctgcgtcgcagttgtttcaccgctcatgatttcattcataacagaatatgcctcatcgtaagtgaggtcttctttattgacgatttttacaatggcttctttgatcatgactcatatctcctttataaaatttctaagcatttgctttccatccggtgtcattatggattcgggatgaaattgtaccccgtagatcggatattctttatgctgcactgccattacctctccgtccgcagtgaaagcggtgattttcagacattcggaaattgtgtcggcatctgctgcaagagaatgatacctggcaacgggagcagtttcaggacaacccacaaacaacggacaatttatgtcaaatttgacatccgattgttttccatgcattcgttcttttgcgtaagtaatggttgaaccaaatgccgcacatattgcctgatgtccgagacaaacaccgagaatcggaatttccttcccgagtatttttacggcttcaacaatcatgcctgcatcttcaggtctgcccggaccgggagacagaatcatgcggtcaggtgttagttcttttatctcatcaactgtcatttcatcattacggatgactttgatattcggatctatttcgccaatgagctggtagaggttataagaaaagctgtcataattatcgataagtaagatcataattctgcctcctgtgcaagtttcaacgctttcagcgaggatctggctttgttgatgcattcttcatactccttttcaggtacggaatctgccacgatcccggctccgcttctaacaaaaaccttcccgtttttcttgtaggcgatacgaatcgcaatacaggtgtccatatttcctgtgaagtcgatgtatccaatggcgccgccatagattccccgcttgttgttttcaagttctccgataagctgacaagcccggatcttcggtgcaccggaaagtgttccggcaggcaataccgcttcaatggcatcaagtgcatcgtgtttctctgttatttcaccccgtacagtagagccaatgtgcataacatgggagaatcgttcaacagaatgcagtttttccacctgaacggtgccaaacttactgattttaccaagatcgtttctgccaaggtcaaccagcatattatgttcggccagctccttttcatctgcaagcagctctgtttccagtgctttatcttcctcatcgttttttcctctcggtctggtaccggcaagcggaaaggtgtgaagcacaccattttccagctttaccagagtctcaggcgaagcgcctgcaacctcgacatccgttcctgaaaaatagaacatataaggagacggattgattgttctaagaacacggtaggtattgagcaggcttccttcaaagggagcagacagtcggtttgacagcacaatttgaaagatgtttccctcatgaatatggtgttttgccttttccaccatggcacagaactgttctttgccaaacagtgatgtaacctctcccagaagcttcccgcctggttcctccctcttttctccatttctaagaagttcaatcagtcgcttcagttccataactgctttattatatctgacctcaacatcatcaagcagcatattgacaataagaacgattttttgtctgagatgatcaaaagcaataaccttatcaaaaagcatcagatcaacatccttaaaatcctctgtgtctttggcgccgcatttcactgttggttcactgtaaccaagatagtcgtatgaaaaatatccgacaagacctcccgtaaatggcggaagataatcaaagcgcgggcttttataatctgcaaggatctgccgcagatagtcggacggatgttcggtttttaatttcagatttccgattttcatttcaccatctacgcaagtaatttccatctttggatcaaagccgaggaatgtataacgtccccaggtttcgttcgcctgggcggattccagcatataacagtgagtcgatacatttttcagtatctttatgatttcgatgggggttgtgaaatcggaaagtatttcgcagctgaccggcagcacattgtagtttacatctgaagcaatctctctgacttcagctaacgttggaagaattttcattacctgcacctccaaattgataacattacattaatttcggttacgatcaagattcttatttaaattctatatccggcgcacaaaagcaccgccaatatctcgtcaacagcatattgcaacctccttttaaaaaagctcctttgactgatatctctcgtcaaagaagctttataaaaataaaaaacgtccctgacagaaatatagcctctgtcaaggacgaatagatgcatctacagtatgactctacccgcggtgccaccttgattcacggtataacccgtgcacttagcaggataccaacatatccccggcaactgacgtatgcccacacgttgcagaatactctgggaaaatctcccatttgactgcaccctcagcggtccatttgacaacttgtttcttgcctgattctcagcatctcaggctctctgtaaaggcatcattgccgttatctccgcttcaacggtttactatgttaaattgctttggattttagcacaaacgaaataatgtgtcaatgatattttttacgcttgttagagaaatattctacgataatggtaagcttttgcctaactttccttttcaactatatccattatcttctttcactataatttttctagttattcacccatgcacctctcttctaaattggacagcatccgtatatccctcgcagcctcaattcataactcaagcctgactctatcacttcgtccataagagcaaatactttatatggtaaaattatatcctcctgatattttatcacaaccatttgcataataacttaattattctttatgtccgctcctaatcttggatcatcttcatttcgatatttcgctatatccgttaaagaaatgaattcattttcaaaatttgttgtatagatgccaatatcaatgccttctccaaattctactgtcacactgataacactatttagttacttacgggacaaaagcacgatactttcgacggtactttcgttgtcccaacaaagttcctgtgtctccctgtctccaaaacacaccgggaaacggaactttacgtgcttcaggaatctgccatctggctgctcctgctcataaatatccacctgttctacaaaactgttaagaaattctttcttctccaggtcggtgaacttatcatatagtttatcaaaatataaaagaaattgataggcgttttcttctgatattctctattgccggatattcagcaggcggttcttgacttcctctatactgttctccacgccttcaatctcatcatacagacgatataaccgtgtctccatatcctgatatttcttttcataaaatttatccatgatgtccagactgtccatctgctgtccaagtcttgcttttgctccggtcaactgcctgtgctgcttttccaatccttcaatctctgtcaccgcagacagaacgtaaatcatcagctttccactatcttttgagttgtcaattccatcttctacacagatcagattcacttcaaaatcctgcatcctctgcaaagaatttagaacatccgccgcattacgaccaaatcaggaaagcttgaacaccaatacaagctgtacctcatctattccattctcagcattatccaacattctctgaaattccggtctgccctctacgctctttccagatttaccttcgtcagaatattcacttacaatttccatgttctgaaattccgcatatctcttgagtttttctttctaagcatccagactgtagacatctatctacatggttgtggatactctggtatatatcgcatttaatctttttattcttcataattttcctcgcaatataactttgttttatagtcccaactttatttcagtacttgttccaactaatttcaatacttattttccgtattgacgcatttctctgtcaatcatataattaagttagatacagagcatttctgttatcaaaatatattgcccgcccaccattggcgacttataaatgattgactcgaaaatattgttcgcttaccggaagcgtctaataaatgtccggcttgaatattatttaaaaattataattctgccatctgtcttctcctggtcggtaagcttatcatataatttatgtaaaagatatgacgcttacaacttctctggacgctttctcaactgaaataaaatattcgagcaacaaatacccacctgttcacatttggatatttgttgctcgattttatattttctcttatgccggaaatactatctgtgcatttacacatgtcataatagttataattactgcattaattatgccccctaaatatggattcctcgtctttttatagattgctcttgtaacaaaaggagtaacaagcataggtactaatggagctaccatccagtcagatatctgattgtttgtaccataaaaaccattcacacctgtaataaagaagtatccatatccagccaccgccaaaagaaatggtggcagaatgttcaaaaatgcaagaaggcagatatttttcctttctgtttttccaaaagatgtattaaaattcaaacaattaatgaaaatagaagctgtcacatatgcaactgtaaagaatggtaagagcttcatagcttccaacatacgtcttgcgttaaatggccgtactgcccaataaagaaatctgaaatctgtattaaagaaaaatttcactgaaaagagcaggacaaatgccatacctgtaactactaatgctgtcgcaattgtctttccaatctgtgcaactgatgttctcatatcaatagaatccaaactgattccatttttctttgcgtaacaattataccagatgatagtggtaaggattacaaatattgcatttaccgttccccatactccatagaacaacggcattccctgcataaaaaaatcatctaccactttatccactttaaagtgaaataacaccaacgcactgagcaacggaaatacggtattaaccaacagacaacctgtaagccatatttttccttttttatcatttgctgccagtctcattgttgcatcgcgatcagcactaacacctttaaacggttcatactgcaccaaaagaagcgctactcctgttacaaatacaaaaaatcccgcaaatcccattaaacatcctaatgtttttaatggaaaaatatgattgtcagctttcagcgtactatctgttggaattacagtttgcataaattctactgcatctgtacatgcgtcaggcacatatactgatgttccatgtgttgctaacggcatataaatgatacgttttgctgtttttccatctatttcctgttcataccactggccttctaacccatcctcagttttctcatccggcgtaataccaaaattcaagaaagatttggcattgttagattttaaaaactcaggatttggtttcatctcacctgtttcttcatctttttctttaaatgaaaaatcatcatatttatcagcaataatacctacatctcgatttccataataattgaagtattctccatttccgcctttttcagcagcctgtgttgtattggtttttcccggaaaatatccaaatgatgcagtttcattatcacgataaatggcatctcgtcccacataaagaattgccttaattaacggtgtttccagttcattgtccagcaaaacagactcgtggatggtattgcctcctctggaatgtcctgatactgcaattctatctgcatccacataaggcaatgttgcaacatactgaaccgtgtcatacaatcctcgtccattatcaaaccattctgtatcatttaaaacttccgattcaccatgtccatacaagtcaaaggaaactactacgtatcctcgccgcgcccattcaatctgaaaattatcacttcgttctttatttgcatttcctccatgcgcccatacaattgccggtaatggattttcttctcctgcctcattaggaatcaatacatctgcactaatcgtatgtccagaattgctttcaaataaaattgttttttttgtaactttaccaaaatcagtttgtgcaagattagcaagaaaccctcctaataagcacatacaaagagctactgcaaccaacaatccatacttttttttattcttttccattattccttctcccttcttttaattttttcataatgtatctacccaccctgtcgctctgttctgtttccggtgagttaacacttattacagaattttgatctgaaagtacaatgcaatactgcccatattttccattcgccatatatgcatctcccttcaaatgccagaatagatatccgtatccgtcaacctgagaattattataatccccacattccacctgtttctttgttgattcttcaatccatttttctgaaagaatctgttcacctttccatttgcctctctgcaaataaagctgtccaaactttcccaattctcttacattcatttgcaatcccccagcaccaaagacataacccttggggcaaaattccgcttccaatggtttgatctccagtttgtcaaataagcgaggggtaagatactctatcagatttttttctgtctttctctgaatcaaaacgcctaaaagatatggacctgcattattgtattgaaacactgtccctggtttttctgttactttttgtctgaatacataggatacccagtcactttctttcaatgtctttctactgtctcccataagaatcggtgtttccagtcccattgtcatagtaagcaggtgtcgtatttccatcatattccagtaaggatcttctatttttattgcctcatcaaacagttggcaaaccttactgtttaattcaaaaagtccctcctcaattgcaaatccaactgccgctgaggtaaaacttttcgtaatagaatattgattttgtcttttatattcctttttcatgaagcaacctatttcttggccgtcttgaataatctgtattccgtttattcctattttttttagtgtttcaatatacgtatgtatctctgacatttttatatttttccttttctaataggggagtatccctattattattgcaaaacccaacattgtgatacttaaaaataatgtccataaatatgtttgccggatatgctctcttaaacttacgccacacagagaaagtccaagatgaacagatactgtcattggaagtacaaaaataactgcactatatggaatcagaaatgcggcggctgtaacttccactgctatttgacactctgatgctatttttgcagcaattggcatgaatccaaaaatttctacttctccactcatgatccagcttatgggattggccagcgccccgagtaaaatatgtatatgctctctcatgcttaccggaagtaatccagatatcatttctgacatgcttgtcagcatgctgctctgtgtcagaacaccaaccataacgcctgatgccaaaactgttcctgccatgattcccgctgattttatgtatttcattaattccattttctttacttctttaagattaatgatacttattacagataatcccatcataaaaacaatccacgaagagattcttgtaatgataagcaaaatgattattattgtcataattcccactgacaaacagcgtttttttctactttgctgtattaaaatcggcttatttctcgcaatacactgcttacaattattttcactcaaagaatcaatatccgaaagcttttgatagtttgacaaaatacaggcaattacacacaccatcagtattccaaatatctgagacgggatacacaaacgccagattgaaatcggatctgtatttaaaactcctgcaaggcgtccgcatggtcctgcccatggcaacatattcataacaccaaaagttaaagaactaaggcacatcaaatttgttaatggaattttattttcgttgtatatacttttacatgttgtaatcacaatcaaatacgatactgcacctgaaccacttaaatgtgcgattgctgatacgaacacagtcataagaaaaatattcttcctggttagatgaaaccttcctgctatttttgtgattattgctgtgaaagttcctgtttcatttaatatcccaaaaaataaaatcgcagttgcaaacatcaaagctaccggaatcacattttcaattccttttaaaatatacaaactcatttctgccattgaaaacccggataaaaatcctgctatcaccggcaatgtcataaataaaattcccagacttacctttatcttatacaccagcaacgtcatacatatcataaggacaaatcccataattcctgatatatccatctcaaaacctctgaaaatgaaaccacccataaagctgcgcaaactttatgggtgtattatatgttcgtttttttcttttatcaaataacagtttcttatattgtatatacgtcttcgttatattttccctgaactctttctgctgcggtttgatataactgaatgagatattttagaggttctgtcatatatcctcctactctcaatgctgctacaaacttccaggtaaccggctgttttccgaaagaataaatatctaatctattctgatattctctcactccaagactggaacaaagacacaccccataaccatttgccacaagctcttgtgcggtttcgataccggctatttctattttttccggtgatatatgattctcttttaaaatttcttctgctatctgtcccaatctcatattcttttttagtaaaataaaagcaaacttttcaaaacatgaaagttctacccagggatattgaaatccaattttgcgtagaggcttgcaggcaatttctgttcctttttttacagtcagcacgatttcttcttttccaagtatctggtaatacaaatatttatcgtctgctttctcttgttcactcaatgtgaaaaatgctacatctatgcgtccttttctcaacgcttcctccaaattatgcacattctcctcatgtatctctatttttaattcaggaaaattcttccgtatttcaggcaaaaccataggcgttagggatttacttctccccggcgttatgccaaaacataatgcgccctgcttatactgcaacaactctttcaaatctgattcgaattgaatttttcttttcgtaatatctgctgcaaactccaggtatatttttcctgcaggtgttgaaacataatctccatctattttttcaaaaagctgaattcctaattccttttccaaattaataagacatctactgattgcaggctgagatacattcagcatttgtgctgcctttgttatactttttttcgcttcaatcgcacgcatatattcaaattctttaaatttcattctcacgtctcctaaccggaaatttagacttattatcgtataaaaatcgcttttgttatacaaaatattcacttttgttatgttcctataaagtcccttatcttttttggcattttgcacaatttcaacatgcatttttataaaatttgccaatagtattattttaattctgcgatctcatgagggatgctttcctgtgtttcttacgggtaaacattatacaggaagataactgtttgttcaagtattctgaaatcccccatatccaacctttcctcctcaattctccaccaaattttgaagtagatcagtttcataatgcggataaggcaataaaaagcaaaagccgttccacacctcccagaacggcaaatttacagatgcaaacagacgtgacctgtagcaaaattaacatcgcttttcttactcctttcctccggtgcatctgcccagatgattaatcccatatgctcctttgtatgatcagttctttctacgatcagttctgccaccgtatgtctataaactgcgtaaaatcatgttttcgccctccacgtttaattgagttaacaaattaaatataacagttttatcggttgcattccaccatgcaaggctgtaaatctgtcacctggcagttgcagaagcaaagattggactttctcatactttaagtttacagataccttccgccaataaacccccagtaatctccagtttttagcttctccttttccttatttaactgtttttcaaagacattccacatatcatttatctactacgtaccaatttattacacttcttctgataaattccatcagcacattcatagtattggattgatgtttcaatctggtttgcctcgaattaactgactgcaattttttcaatattatctactattgtttccgatacttctccccacgaaagatcatcaacaaaatagtttacacgcttaaaacgattccacatttcttcgagtccaaaatcatctttaatcttgtctaaggtttctctcacttcctcctcgccaaaagaagtttctcgcttcatgcaagtagccgcaaatgcctttttcaaaacatcaaaacttatctgatcagcctttgaattcataatctcatatacatcataaaaatccctcattctggtattcgcaagtcctcttgccaaaatcgtctgcatcttttctgcaagaagagtttcaagattatacgacaaaactgaaattaatctgtcttcaaacataagcttgtatttatactccactgcacctggcgtgattgcatcatccgtagaaatatcgatcttaaaaggttgtctcattcgttccagattagcttctatcatcatcctaatgccaggataatcaaattcttccatgatttcttttactgatgtaatcttaaattttaccccatcttcaagctgaagctcaccgattctctcaatgattgctttagcatccttctcattaagaggtaatgctttcacagtggtatcgatatccattgtagctctcatgtctacaccaacaatagaagcaacaagcattccgcctttcagaataaaattattcctgtattcagaaacagaaactctttctaagaacctttccataaaatatgttctaattagtgcttgcgcaacttcactattcccaccggacatgttttttactttgtctttaagttgtttcgctgtatgaatcatatcattacctccacatacatcatcacttcatcccttactccaagtttaaccgcatactcaatcaatcttgaaagattcttttccttcgaggacatatattccttgattgctgtctgatataactgaatttcatatttctttcgatctttaatcaaatcacaaatacatctttccttgtcatatactttaaccaaattaccgctgcttgacggaatttcacaggtccccatatcaagaatctctgggtttgcgtaacgaacttctttgtttttctttttgatatgtgttgcattatacccggtaggaacagtgaaacaaatatgactgtattctctgtcgataagaccatgcaaataaagggcggtctcgcccgaataaataatattcttatttcgttgctggagtacaaacaactcatctggccacacattatctaagatataaatgccatgtgccactttttccatatcatgctctctgacgtattttgagacagatggctttgatacacctgattcaacggccttcgatgtaatcaaatatccattgtctttttcaattagcgattccaaaatatctgatgttgacatagttgtcctccttatccttgatatttatttttgtgcttaaattatattgtatttaagcgtaaaagtaaatgcaatccttatatgcttgcagaagtaaaagataactcaggatattgctgacatggattttattgacgatctgccggaaagcactgaacaggaacggtttcaaagacataaccgttttctgcgttccctgaaatccgatactctgcttatcatagataattttaatgtcactgccacacaggacagctttgcaggcaacatcgaaagaaggtgccagatatggcaatttatcatatgcaagccaaagtcgtcagccgtggttccggtcgatctgctgttgctgcttctgcttatatgagctgtagccgcatgtacaatgattatgacggcattcagcttgactataccagaaagcagggtctgatctatcaggaagtgatgcttcctccaatggctccatcggaatggaatgaccgggaacaactctggaatgctgtggaagaaaccgaaaagaccaaagacagccgactggcaagagaatttgttgtcgcactccccgttgagttggataaagacagcaatatttctcttcttcaagattttattcaaaagaactttgtagatatggggatgtgtgctgattttgccattcacgatacagatggtcacaatccccatgcacacattcttcttactgtccgaccactaaatgaaaatggaacatggcagtataaaaccgaaaaagaatatctctgtatcaaagatggagaagaaaaaggatttactgcttctgaatttaaaactgctcagaaacagggatgggaaaagcaatatcgctataaagttgggaaaaagaaagaatatctgacttcctctgttgcacaggaaaaaggatatgaacggattgataaacaccccaagagtagccgatatggcagacagaatcctatttccgaacaatggaacagtgatgaacaactttgcatctggcgggcaaactgggcagatgtcgtaaataaaatgcttgcacgtaatcagataaatgctgccattgatcaccgcagctttgcagatcatggaatcaccgaacagccaaccatctatgaaggctacatgccccaaaatatggaaaagaaaggcatgatagcagaccgctgtgaaatcaaccgtcagattcgtgcggataacaaaatgctccgagaattaaaagcaaaagtagcaaaactggctgaagctgtagaaaagtctgttccgataattgcagaaacattggaagtaatccgaaatcacatgatttttacacaatatcatttgctccacaatgagatgcaaaaagaagtgatccatgactggatgaatcattttaatccaatactgaataaatacaacaccgttaaaaagaaactcaaagctaaagttacagagcggaaagaactgaatgtaaaaaaagagaaaaccagtattttgaatcccatccagcatataaaattgaatcagcagcttaccactgttaccgaagaaattgaagaactgaaatcaaggaaagagcagctaatcttccaggcacaatgctctaccgataaagatatgacaaatctatccaagaaatatgaccagatgaataacaatcttgatatcctggattctcaggacatctcgctcaaaaaaacagcttgaaaaagatgccgccgctttccgggaagaaaaatttcttcctgaaccagaacaatacacagaattgctggataccagaatccagatacgtcctgattttcgggataagctgattgaacaactcaaaggtactttcggtaaatattacgactatcaccgtcgtgatattgcagccaatgaggtggattatctcaatgtggaggatcctgatgttttctcccatcgtgcatgggaacttgaatatcagcgaaaacaggagatgcgacgaaatcatccttctaaaattaagaaaaaatcatatgtatggaattataaccatctttgaatagataatatgttcttacaaatctcttgttcaaaaaatgagttcttttcaaaaagcgtatggatttaaaacttccatacgcctttttatattccgctcttcaaattgtctaaaagttgacttggctcagttctttgctgagggtgaagaagcgcaactgaccgaagaccagcagatacttttttcaaaatggagtactctgacagataggcaaaagcaaatcctccttgaactgatggatgccatttgaagcacatcaatcccattaccgggaaagatgtgcttttctttttccccttttaatcaagctgtcaactcaacatatcatttatccaacctgtcaactcaacacccccaatatcaaaatcaaccactcaactctccactctttttcacagtagaccagttcccacttacccgtaaaacgaaaaaatccgggaaccggaacctgtcctctgacaagccccgactcccggaaattccttgttttctacactttttcgctattctattctttgacttttgacatcaatacaaccgtctccacatgtaatagttaggctattccgcaaaatcaatcaaccacttaaaatcgtccgatttcacagtatctctcaatcctatcatcttaacaactgctactttttgattaggctattcttcataacaaagcatttaattgattacaaaacaaccaaagcactatcatgctgatagaagcgttatttactcttgctctctttttaacatgctttcaaccaacactactgatacgccactattttcttctcccatatccattatgtccgcataattacccagagcctcatccaagagtgttctagtacccatattttctgtatgaaaatgattatattcgctacttcttggaaatgatctcacttgagcattttttctcttagaatatttaaaagctgctattcttaacaaatcccatatcacttttgaccatccatcttctgttgaatacggattactatcaattgtacgccccgatttaaacttcaataaattaataagttctctagataaactattattaatacataaatcatcatccggcacagcacatcccatgggaaacataccttttccaaggtaaattccattcgttaatggattactgtcaattaacaaatattgcgccccatcattgattgttttaggcaaaacgtttcttttcttaccgtttaaaaatcctgctcgataatatgtgaattcaggccaccttctatataactctaactggtgtttctcgctttgatgtattcttaacaaaggataattcgatactttagcttgaagcaatagcgcattcagtatcctttcgccattttttctcctctccgcataaacaaataaaatatcccccaactcaggctttttatctaaaccaatatctactatcggtttttgatggcaatatacactagaaactgagaaatcatagctaggaaaaaccgctaccaatatattaaaaaattcttttatgaattgagttgataaagcaagcatgtaatctggctcctgcggtctacatctaatttcaatccatttcacagcatttaaaattgcattttcaattagcggttctaaaatagattcattattatttataacattcgcattcattttttctcctaattttgttccatcggctgggctactgttttcacatcagtatcgtattcagtatcagtcacatcagaacgagtgtatctttcatcaaataaatcaattaaactttccacttctttgtaagtatttagtacgatttgatgcgaatcttgattaaaattgaatttgccctgccaccgcggcaatgtattgactttattcattagttgctcttgcgttaaatcaaacacttttgaagatccaatacgcatcatcttttttgcatactttgattttcctctgctaatatattctgtcaatttctccgtattctcaataatgtttttttgtattatacattgaatcgtctgctgtgcagaatgataaatataatcctgaaatccaaaatgcttttgtaaaagtgaagtattattggtaatcagataattatccattattaaaatatcaattttccttgctattgtcagcaaactttcacgttgttcagcaaacacaatctgattttcaaatcgcataagccgagccatgggactagtcttctttttattaggaaccataatactccaaagatgttggtatagccaaatctcttctgtcccttttctgaggcagaaaataagaccagaactatcaagtaaatcgtcatctacaaatttatcaatttcatttggatcagataaatatgtaaacggttgaaaattgtcttcttgttcaaaaaacaaatacttgtgctgattatctgctaacatacgtccatctgcatattcacattcctgcgctaaaaatttttcctgaagaatttccaaaaacatctctttaagtatcgttctaaaattctttccttgctcattcacttcctcagaaaacgatattcttcttaactttggagaatctttttttacaagaaaagcttctaatccacaacgtgttgaattatcacaatactcttttatttttgttctaatttgttcctcatttaaatttgcttctggcatattttctttctcctttgaatttcattttctagtcattataaacaacaaaaactccatccgagatatatttgcgctttattacagtttcctctgctattgacgttttatatgtaatcccgatatatgttctttctggatatgtaatatcatttgaagggtttagaaacttaaacgaaaacgttctatacttcattgcagaaagtactgggttttggtaaaaagtattagatcttgttaataaaagaacaaccattataagcatcgttaaaaacacaatcagccctctaacagactctacatcatctgttaaaagaggcaaaacatatgttactaaaaaggttgccccactatcattaggcgaatcctctattataatttgctctcctgctgatttaaaacctgccttttgcattccattgaatccgaacgcaattacaatcgtaattattaaccaaatagtactgataattgaaataataaaacttccaaaagagacgtgatttgctgcaacactaaacgcacttattcctgtgttaaccagaacttcccaaaatctatgaaccaatttcaaatataaacttatgtccaaatgcttcataaataatagcaaaaatagcggtgcgaatgactgtagaacaaggcatctttttaagtttaaattctcaatatccatgaaatccacccctttccgatttctttattacttaattcatgcctagtgtttacaagctacgtttcccaagagtacctattttcgcttagaactatattttttgcttttcctctgtgtaccattaccacttcttaccacgttgctcctacgtgctttttccacctgcacagcctcaaatacttctttggaaattatcgcaggattattatccgaagacaaatattgaacctcacccttaccaaatttcagaagccggacatcacccgtatacttctcattgctaagcattacatcaatcgttctcttacaccatttctcttttccggtaggcgaaagaatttttcgtttttcaagttccttaataaggcctataacactttgaccactgagatacaaatcaaatatcagcttaacatttttagctgtttcttcatcaataatcagatggccttccttatcatgcttatagccataacattttctatcgtaaagttttgatgttccggatgtcgctctttgcttaattccccatctgatgttatcacttcttgattcattttcagcctgtgcaagggattcaattactgaaatcattaagtcgctatctgtatttgcagtgtccagttcctcctgctcaaatattacacgcacgcctaatgtccttaattgattcaaggtgtccaaaatttccacagtatctcttccgaacctgctgatatttttcgtaattactatctcaatttttctcgaattacaatcttccagcagacgattgaattctttccttgatgaacctgtcttgctgatagcaatatccatataaacatctgccaacacccattgcgacatggcagccgtcagtcttgtcaaatgagatacttgagcagtcaaactttgcagttgatccatgctatttgtgctgacacgacaataaataccgacacgttgttctcttttgggtatcggaggtataaaatgtacctttgaatttccctgcatattttatcctcctcccatctgccgcctaatcactataaaccaataataacatatagtaattagccaattcaatcattctgtcaactcaacatactaaatatccatcctatctacacaacatacccaatatctattccgtcaactcaactcttcggatggatatgttcccacgcattgattttaaggggattttcgtaaattcatcacattcaaactctatgctgtatttcgcaaaatcctctaatatcaagctatttccgcgctcttatttctcaacccgtgacatcaatactacgcactcaacatgcacagtctgcgaaaactgatcaaccgccctcactttcaccagttcatacccatttccacacagatacttcagatcccgtgccagtgtggcagaatcacagctcacgtacacgatccgttccggctgcatctgcaccatagtctcaagcagagattcctcgcagcctttccgcggcggatccactacaatcacgtcagcgtgggcctgttctcccggatgtgccttggcataatccgcataatatcccggcagaacctcttctgcttttccaacataaaactttgcattctcgattccattgatctgcgcattttttctggcgtcctcgatggcctgaggaatgatctccacaccgtagacttgtttcgccttctgcgccagaaacagggatatcgttccgattccacagtagagatcccagaccgtctcatctccttttaagtctgcatactccagtgcaagtccgtacaatttctctgtctgcaccggattgacctggaaaaaggacagcggagagatctgatatttgatttcaccgatataatctgtaataaatgcctgtccccacagcacttcataagaatctcccatgatcacattggtgtttttctgattcacactgatcgtgatactggtcattccttcgattttctgcagtaattcaaccagtttttcacaatgagggattttttttgcgttgatgacaagacagaccataatctctttggttgtaaagccataccggatcaggacatgacgaagtaagcctttccctgttttttcatcatatggctccatctgatattgctccataaatgacaggatggtttccagaatctcctgattctgctctactcccagtgcacagtctgtatttgcaataatatcgtgagtacgacctgcataaaaccctgtcactgtcactccatttttatcttttccaaacgggaactgcgccttatttctgtagtgaaatgggatttccattcccacgatcggatctgcaattttttccagcagttttggcgaaaagccgccgatcctctccagatttcccaacacttttctgtttttaaactccagctgcttctcataggaaatctgctgaatctgacatcctccgcactgtcttgcgaatttacacttcggctccactctgtctttggacggttcgataatctgtatcattctcgcatatccataatttttcttggctttcataatttttgcttccaccacatcaccgatgaccgcatccttgataaacagcgtatagccgtcaatttttccgattccttccccgttcactccgatatcttcaatcgtcacctttactacatcattcttctgcatctgtttttctcccttatctgaaaaaagagggcgcacaaaatttcttgtggtcaccctcttttgtttctctgtctctaaatggaacttcttctcatgtttgtctcaaacatccggttgtaacccagccagtcatttcccggtttatttttaaagatctccgtcagagtctgcatcttggcatctgcattatctgccagattcaatgccatcgcctctgcgagggccggttttttcggagaaccatactccaactccccatgatgggaaataatacaatgcttcaattcacttcccagtttttccggaaatcccggaatctctcttatcgcatcattcatcatctcaacaccaatgatgatgtgccccagaagctgtccgtcatccgtataatcattatccggaaatgcagaaagctcttttgtctttccaatatcgtggcacattgccgccgtataaagaagatctctgttcaagatttcataggtgtccgcaaaataccgacacatcttcacaacacttaacgtatgctccagaagtcctcctgcaaatccgtgatgaactgtttttgccgcagaatgtcctttaaacacgcggataaactcctcatctttcacaaaataatattccagcagctgacgcagccacgtgttggaaattccacggataaatccgagcagctcttcatacatactgtccacactcttctcagaagtcggcatataatccgccggattgtattcaccatcttctgcttttctgatctgacggatgttcatctgcagacttccgttataacttatcacatcaccaaatacttcgatgaaatccttctcatcatactctgcgatcccctgagaattcggatcccatacttttccatccagtgttcccgtcttatcctgtaaaatcagattgtcataaggctttccgtttcttgtctccgcggaacgtcttcctttacacaggtatacattcctgattgtctcgccttcatgtaaatccttgatatatctcataataattttgtttcctctctatttttgctattctttactcacggctgtcaagtaccagctgaaacgaaatctccacgtatcctcctgcaccgagacgttttccctgaatccggatcgtatctcccgctttacacttctggagtaccttttcatactgagccatagaggcaatctcctcgccgtccacagactggattacatcaccgctctggattcccgctgccattgccggagagttcgcctgtatctgggtcacatacattccggacggcacctgctttgattcggaaatatcactgctgaccgtcactccgtaaatccctgcatagggaaccaactgactgtttaaaagcagttccatgatcggttttaaatcagaaataccatatgcattggcagtatgcccctgattctctgtccagatctcggaatcaatgagtccgatgatctccccgtccagattacacagaacaccggaactaaaatccgctgacggaatatctgtcgccagaacgctgaatgtatgatccggaattgctttttcatgtgcgttagaactgatcataccatatcctgttccatctgaatatccaaatgtatctccaagggcgatcaccggatctccctctgccactatatttgaatttccgagaaccgctgtttttatctcattccacgtgctttcagaaatcagatttcttctgacaccaaacaccgccagatgactgtttttatcctgctttttcagcgatgcttcacaggtgctgccatctgaaaactgcacattccagacagtggattccccgcagacagaattgttgctgaggatcaaaagctcctgtccattgtctgctgcgatcagccctgtacatcccatatcttcattatttacatcctttgtaagattcgccgcatcctgctcaccccggaccgtgaccacactttttgcggcctctgctgcaatctggtaaacactctgcatcatggcttcataatcttctgctctcagatttttctcctgcgaatcctgctcctgcgcctcgtcttcttccggatgcgtctcttcactgtcttccggaatggtcacagttttcggagatcccggaaataagttctgtacccacggattcagggcatagaaacccagacaggcaaacgcacctaccacgattccgtaaacagccagtttcagaagctgttttctcacctgttttccggtgatcggttccggcttgatcgtctcctgcagaaaagaaaaactatcctctttttgctcttcattcaagtctttgggggacttttcttttgggtcttcattccacggcataattgctaatctcctctgctgtatagtataaccgattcccccggattgttcaatatttatccttttcattcccccacaaataaggtaaaatatagctgtgagttcgaattataaaaggtgaaagaatatgaatcaaaaaacattgacaaaattagaatattataaaatcactgcgcttttggaggaacaggcttcttccatgcgcggaaaacagctttgccgcaagctgaaaccgatgaccgatccggaaaagatcaacactgcacaggagcagaccgaagcggcatttacacggatcgtcaaaaagggacgcatctcttttggcaatgtattccccatcggagagtctttaaaacgtctggagattggcggtgcacttggatgcggagagcttcttcgcatctgcaaagttttacagaatgccggaaaagtaaaggcttacggacgtcacgacacacaggaagagctttgtgactgcctggatgtctattttgaacagctggaacctctgtttcctctgactgccgagattgagcgctgtattcagggggaagacgagatcagcgatgatgccagcagcacattaaagaatatccgccgcagcatcggacacatcaacgataaagttcatgcaactctgacaaatctggtgaacggttctctgcgcacctatctgcaggatccgatcatcaccatgcgcggagaccgctactgtgttccggtcaaagccgagtatcgcagtcaggtcaacgggatgatccacgatcagtcctccaccggttctacactgtttatcgagccgatggcagtcgtaaaactgaacaacgacctcaaagaactgtatgcgaaagaacaggaagaaattcaggtcatcctcgcccgtctcagcgaagagaccgcgcagtatattgaagagatccgcacggattaccgtattctgacggatcttgattttatctttgcccgcggtgcactggcactttctatgaatgccagccgtccgatcctcaacacagatggacgcattcacatccgtgagggaagacatcctcttctggatccgaaaaaagtagttccgatcacggtttctctgggagacgatttttctcttctgatcattacaggaccaaataccggcggaaagacggtatctttaaaaaccgtaggactttttaccctgatgggacagtccggccttcacatccctgccagagaccgttctgaactggcagtgtttaaacaggtctatgcagatatcggagatgagcagagcattgagcagagcttgagtaccttctcttctcatatgacaaatattgtctctttcctgcatgatgtagatgagaattctctggttctgtttgatgagcttggagccggaacggatcctaccgaaggagccgcgctggccatcgccattctctcctatctgcacggacgtggaatccgcaccatggctaccactcattacagtgaattaaaggtctacgcactttccactcccggagttgagaatgcctgctgtgagtttgacgtagaaagtctgcgcccgacctaccgcctcctgatcggaatcccgggaaagagtaatgcatttgcgatttccggtaagctcggccttccggattatatcatcgaagatgccaaaaccagactttccgaacaggatgtctcatttgaggatctgatctcagatctggagacaagcaaacgcacgatcgaaaaagaacaggaagagattgcagcatataaaaaagaaatcgaagcactgaaaagtcaggcgcagcaaaaacaagaacgcatcgaggaacaaagagagcggattcttgccgaagcccgcgaaaaggcaaatacaatcctgcgcgatgccaaagatgtggctgatgagacgattaaaaatttccgcaaattcggaaaagaaaatatttcagccgccgaaatggaaaaagaaagagaacgtctgcgcaagaagatgaaggaaaataccgcatcttcatctttgaaagtacagaaaccgaaaaaggaatacaaaccaactgatttcaaactcggagaatctgtaaaagtactgagcatgaatctgaccggaaccatcagttcccttccggattcccgcggcaatgtgacagtgcagatgggaattttaagatctcaggttcacatttcagatctggagattatcgaagaggcgaatccttatgcaccaaaatcattcaaacgtacgtcaaaaggcaggctgaaaatgagcaaatctctgtccgtgagccctgaaatcaatctgcttggaaagactgtagacgaagcagtttctgagctggacaaatatctggatgatgctctgctgtcccatttaagcacagtgcgggtagtacacggaaaaggaacgggagcactccgaaaaggaattcacgaattcctgcgccgtcagaagcatgtcaagtcctaccgtctcggggaattcggagaaggagacgccggcgtcacgatcgtggagttaaaataaacggggttataagagaggagtatttatgattgcaaaacagaaaattttaattgtggacgatgatgagaatatcgcagaactgatctcgctctatctgatgaaagagtgctttgatacgaaaattgtgtcaaacggggaggatgcgctgtctgcctttgagacatatcagccaaaccttgttcttctggatctgatgcttccgggaatcgacggctatcaagtctgccgggaactgcgcgccaaatcacaggtaccgatcatcatgctctctgcaaaaggagaagtatttgacaaagtactgggactggagctgggggcagatgactatatcatgaagccgtttgactccaaagagatggtagcacgagtgcgtgctgtcctgcgccgttatcagccggtcaagccggaagcacctgccgcagaaaaggtaaaatgtgtcgagtacgacggacttaccatcaatcttacaaactattccgtactgtgcgacggccagaacgttgacatgcctccaaaagaactggagcttttatactttctggctgcttctccaaatcaggtatttacaagagaacagcttttggatcagatctggggctatgaatacatcggcgacacccgcacagtagatgttcatatcaaacgtctccgcgaaaagatcaaagatcatccgggctggggactgagcaccgtatggggaatcggttacaaattcgaagtaaaataaacaaaaaaggatggatactatgaaaagtacactgcgtttaaaatttatcatgctgtatattatctttggatttctcagtattttcacggtatccctcttgtcgaatcagcttctgctcaataaactggaacaggattcctcacaaaatatgtaccggattgcaaatcagactgcgacctcctacctgccctcatacttttcaaatgatctttcagcctggtctgttcattctcagctgcaggccatgcagctgtatctgaacgcgtccgtctggtttgtcaaaacagacggcacactgattacttctgcccctctggatggaatcgaagccccggaacagatcctggaattcgaccctgccgagattggaaacaatcagtttatctccggaaattatcatggatactttgaggaagatgtaatcactgtcatggcacctgtcacccaggatttttccgtgcagggctatcttttgatccatcgtccggtcgaaagcctgaagcagacatgccattctctgatcctgccggtatacattacgatggccgtgatctatctgctgtcctttctctttctgattgggtttgaattttttgtattccgtccactgagacagattacagaagcggcaactcagtatgcatccggaaatctgacctatgagattcctgtaacaacgcacgacgagatgggatatctttctgcttctctgaattacatgtcctcacagctgaaggatatggaggaataccagaaaaagattgtagcgaatgtctctcacgacttccgttctccgctcacctcgatcaaaggctatgtgcaggcgatgactgacggcacgattccgccccagttgcatcagaaatatttgaatatcattctctttgagacggaacgtctgacagatctgacacaggatcttttgacactcaacgagtttgaccggaatgaaatgatcctggacaagacagagtttgatatccagcagatgatcaagaacactgccgcctctttcgaaggcacctgcacaagcaaacggatttccattgagcttctgcttctggcaggcaatattctcgtgtatgcagaccgacggaagattcagcaggttctttacaatctcattgataatgcgatcaaattcagcggaaacgactcttcgatcacgattgaggtcaccgaaaagaatgagaaggtttttgtttctgtcaaggatatcggaatgggaattccaaaaaaagaactgaataaaatctgggaacgcttttacaagtccgacctgtcccgcggaaaggataaaaaaggaaccggcctcggacttgccatcgtcaaagaggccattcaggctcacgatgaacatatcaatgtcatcagcacagagggcgttggcacagagttcatcttctctctgacgaaggtttaaatccttacaggtctcttttgttaaatatgaaaacagctgctgcaagattcacgataccaacaagcagtgtgactgcaatcgccgcaaaatagtccttgatatcaacacttcccgcaagcagaggtaccccatccagcaaatggatcgggagtgcctcttttattttcggaatgaagcttaaaatatagcagaatgcaaatccgcctcctacaccgagtaacgcagatgctgctgtattacagcagacagacgaaacaatggattcagacgacactttgcgtgataaaatcaaccttaattctattcgctaaatccataatttttgaatcaatgagttttattgtcttctggaattcttcatcgctttttccagtaggatcctccaatccccaatcctccctgtgcctgcatgaaacagtcgggcagttcacattgcatcccattgtgatcacaatatctacaggagggatatctgacaacagctttgagtattgtgtttcttccatatcaatctggtatatttccttcattaagcgaactgcatcctgattgatctgcggtttcgtttctgttccggcagaataactttcaaagacatcacttgcaagatatttaccaagcgcttccgcaatctgactgcgacatgagttgtgaacacatataaaagccactttcattttatccatatctgttacgcctccttctcttccaatattctttttaattcattcttcctttttttcaaataattccataattcacgttctcctttaaataaatactgcgctgaagatattaaaagtataaccgacaatgataatccctgccgtgcatatcccaataaataataccagtaattttggttttacagcttttttcagcatgatcaaagacggcagacttaatgttgttactgccatcataaatgataaaattgttcccagctctgcaccttttgataacaaagcttctgcaacagggattgtaccgaatatatccgcatacatcgggattccaaccagcgttgctaaaatcacaccaaaaggattccgacttcccaaaacactctcgatccaactttccggaatccagttatggatcactgctcctattcctaccccaatcagaatgtatggaaatacttttttaaaagttcctatcacctgctttttggcatattgtaccctgtcttttttggttaatgtcggtgaactgatatcaacacttcttgcattttttacaaaatcctctacatatttttccatatgcagtttttcaatcaatgtcccgccgataaccgcaatgaccagcccgagaataacataagccgctgcaactttcgctccaaaaatactcatcagcaatacaagacttcccagatcaaccataggagaagagatcaagaacgaaaaggtaactcccaatggcaatccggcacttgtaaatccgataaacaacggaatggaagaacaggaacaaaaaggagtaactgttcccagtaaagcggatatcacatttgctcctattccgtcaaattttcctaaaatcttcttacttctttccggtggaaaataactctggatatatgaaatcataaaaatcaacaagcataacaaaattgtaattttgaccacgtcatacagaaaaaattgaatacttccgcccaggcggccgccgatatccacacctgccacagataatacatcgccgatcaacagattcagaaacttcatccccagtatctgatcctgaaaaaatatccagattatatttaaaaattccaaaaaatcactcctcttctttgatatatcaactttttttgatgtattgaagttttataaaagccatccgaagatgacctctatcaacagcattttgactgcttttcactttctggtgttgtcagttccaacagacgtctggaagcatactcacttccacttttactgagactgtaatgtgtccattttccttcttgcctgctgactaccagccctgactcgcaaagtattttcatgtgataggataaagcggactgtccgatattcatatactcaattaaaacacaggcgcacttttcaccgcttttcaaatggtttaaaatcgccagtcgtttttcatcacaaagtgctttgaaaatctttacatcttttgaataatcatccatacccttcaccttacatcaaatatttttgatatgtgtatcatacctctgaatgcatcttttgtcaatatacatatcaactttttttaatatgtctttttacccgatccaatcttcatgcaatactttcattcccatgaagtcccttcccttggatccatggaaatcgctgccggatgtacaaaataactttgcatcctgcgccaccctatatatccattctttttcagaagaatcaaatgctgaataatttgcttctattccgtccagaccgcacgtttttaaatattgcagaatcacctgaatttcttctttttccagttttcgtttttcaaaattgcgataaacaaagaggggatgtgcccacacagcacgtcccccggctttatgaatcaatcggattgcctgctctattgaaatattagcggcattcaacaaagactcaaacacttccagaaccctctgttttcgcgcctccagtgctttgatcagatccggatcattctcatcaaagccatagccgagcagatgaatggaaaatggcagagaaaccgcatccagagtcttctcctggcatgtaaattcaatcccggaaataaatgtgatccgatctctgctaagcatccttgctttttggattccgtcaatcgtatcgtaatccgtcagagaaaaccttgtaatcttcttctccaacaacataggaagaatctcttctatttatagagcatatttttaatggacgcatcttccatattctcgtttgtcacccacacatatcctgtatccacaagagcttcgtttcctgtctgaaggatactccttgctgctgccactacagaagcataaccaattccaaatggattctgcactgcaagcccttcaatctccccatttttcaatgcctcgatctgagcttctccggcatcaaatcctgtaagaacaatttcatctgtcttttctgcctctttcaaggctgacaatccaagctgcactgccgtaacattcgttccgaacattcctttgagatttggatgctgttccatataatacaggatcacatcttcatcgctgagatcatctgctgtgatctctggttcctctgccttctttgcagcattcttttgctctgcaatctcttttttcagatcatccatctggtcacagtaaatcgtatctacaatctgcacattcggatgtccgctcttgatttcttcctgaaatcctgccaaacgctcttttgccacttccgaattactgtcagacgccagaagcagaacctctcccgcatcctcaattccattgcacagctgatatgcgactgtttttgcagcctctgtattgttcgtctttacagtacactggattccctgatacgtatttccggagtccagagcaatgaccggaatcccattctctgctgccgcatcaaactgtaccttacatgcatcctcatcaatacttgcgattcctaacgcatccggataccgcgccagttcttcatccagaatattgacctgttcatcaatatcctctccgtccggtgcattaaaggttgccttgatcttatcttccccactatatccaagagtcttattcagatcctttaccgcctgttccacacctttttttacttctttccaataagacgagctctcatcctttccgatgatcgatatataagtacccggctccagattaagcccctgtatattgctgtaagctgccggtgtcacaaaatccagattagcctgatacgaaggctcctcagtcttatctcctgtaaaagtcggagtctcctcctttttgctgcaggcactggctgccagggcaacacacaagatcgccggtatcactgctcttaattttcttgtcatatcaaaacctccagtataaactgtcttttcacaatagcttatcccccttatgcatcccgtaatacatgctttcggcgggcggacttcgtccgataaggtatactatacacgatttctgtgaaaaaaaagaaatattttcttaattttcgaaaaattttatatttttactctttaaattgcatttgattttaaccataaattcacaatgataatgcttgtatattttcctcatttgtattagaatgttggtaacggtaacggtaatcctttatcgtaattccaaagaaggaggatacatattatggcacacgtaattagtgatgaatgtgtaagctgtggttcttgcgaaggcgaatgtccagtaggagctatctccgaaggcgatggcaaatacgaaatcgatgctgatgcttgcgttgactgcggagcatgtgaagctgcctgtcctacaggtgctatttcagcagagtaatttttaatatttgcaagtgatcacaagcatgaaaagagcattttgaatctcagattcaggatgctctttttcatatccttaaaatcgctgctgttcccagtaatctcaagtcacttcctgacacaatttgacgaacggtttctaaggcgttttacaccccctcatgctataataataccgaaaacagatcataggaggtatattttaatgggcgaggtcagatttatgatttctgaagcggcaaaacaggttcatgtagaatctcacgttctgcgttactgggaggaagagcttgagcttgtcatcggacgcacagaaatgggacatcgatattataccgaagatgatatacaactcttttgctgtattaaaaaactaaaagatgccggaatgcttttaaaggacttaaagcctctcattccggaattaaaatcaaccaaactgaagcttcaaaagacagaggcattaaaaaaagcagctctgaaaaaagaaacggccgcctcgactgtttcagctcctgctgcggtttccgctccggcggctgtgtcaactccagcagccatctccgaagcagaagtcgtgccggtcactcaactggaacaggtccgttctctaatcggagatgtattgacagaggtcgtcgtgtccaacaatgaagaattaaaaaaagacatcagtaagtctgtcactactgatgtcatacgagaaatggacttcctcttccaggcaaaagaacggcaggaagaagaacatttccgcaaactggacacgctgatccgccagcagcaggcgaaccgcaaagaggcggcccgcgaacatccgctcggcagattaaaaaatatgttcaatcactgctgatcctgacgaagttcatttccaaaacgggtgtactgcggcatccatgccagtctgacggttccaaccggaccgtttctctgttttgcaatgatgatttccgcaatatttttgtcttctgtatcaggaatataataatcctcacgatagataaacatacagacatcggcatcctgctcgatggctccggactcacgaaggtcggaaagcatcgggcgtttgtccgttctctgttctaccgcacggctcaactgagacaatgcgatcaccggaacattcaattctcttgccagtccttttagagaacgggagatctcggaaatctcctgctgacggctttcattgcttcttccaccacttccgctcatcaactgcaggtagtcgatgatgatcagatccagaccgtgctctaacttgtacttacggcacttggaacgcatctctgtaatagaaatacccgaagtatcgtcaatgatcagttttgattttccgatcgtaccggcaccttcgatcagtttttcccaatccgaatctttcaggtttccggttctcagtatctgcgcatccacatgagcctccaaagagaacagacgatttacaagctgttctttggacatctcaagactgaagatggcaacggccttctcctgacggaacgccacatgctgggcaatgttcagtacaaacgctgtctttcccatagacggacgcgccgccaccaggatcagatccgaacgctgcagaccggagagtttgtaatccagatcaatgaagcctgtcggaattccggttaccgttccttttgtcttagacgctttttctatcacttccagcgcatttaaaacaacctgcttaattggcgtgtattcctggctgttgccatgctgcgccagttcaaaaatccgcttttccgcagcatccatgatcacatccagcggttgattctccagataacagttgtttgcaatctcttcattgatcttgatcatcttccgaagagttgctttttcgcggacaatctctgcgtaatacttaatatttgccgaggtctgggcgttgaccagaagttctcttgcaaactccagtccgctgatctccggcggagcatttttctctttcaaatgctcctgcagtgtgatcagatccaccggcttccctgcctgaaacaattctaccatcgcatcaaacagcattccgtatgcactctgatagaaatcctcccctgtaagcatctcagctgcgaccataattgcatctttatccatcagcatggcgcccacaaccgcctgctccgcttctgtgctgtggggcaatattcgtttaatcgctgcttccataaactctatttccccttatgcttctttcacggaaacattcaactctgctgtcacttccggatgcagttttacagatacgatatgtgttcccagtgttttgatctgctctttcagctgaatcttctttttatcaatatccagatgcatctgctctttgactgcctctgcaatctccttgctggaaacagaaccgaatgttcttccgccttcaccgactttcatggtaagtacgacttttcctgctttgagttcctctgccagttttttcgctgcatccaggtgctcctgtgcaaccttggcttcattgttcttctgcagcttcaggtcattgagatttttcccatttgcttctaccccaagctttttcggcagaataaagtttctcgcatatccgtcatttacattgacaacctctcctttttttccaagagcttttacatcctgtaataaaatcactttcattttatatatctccttcctctatcatctggtcgatcgttacctttagcgcctcgatcgcctcttttacgtttgtatgttcaaactgtgcaccggctgaattgatatgaccgcctccgcccagtttttccgctatgatctgcacgtttacttcgtctatagaacgtgcgctcaggaaaatccttccattatacactgtcagcacaaaagatgccttgataccattgatatccagcagctcatttgctgtctgtgccgccagtaccgtcggacttgcaatgtcactcggacactctgcaatggcatactgttctctgtagacctctgccatacgcatcgcctctgccttggcacggtaagactccatatcgtcccggaacatctttctgacccgggtaatgtccgctccgcagcgtcttaaatatgccgccgcctcaaatgtacggacaccggtacggttcatgaaattcctcgtatcgatcatgattcctgcatacaggcagtctgcctcaatggacggcaccttgatatcatccacaatatactgcagtacttctgccaccatctcacaggtggaggacgaatacggctcaatataggacaggaccgcattgtcgatcaccgtactgctctgccgatgatgatccagcaccgcaatggtcttagatctctttaaaagttccggacactctgtcatctgtggtttgttcgtatctaccaccacgaccatagcgctgtctgaaatataatccagcgcttccccggaagtcaggaaaatatcttttccatacacactgctctgcgcgatctcatcatacagaggtttgatcgaggtactcacgtcgttgatcacgatatgtgccttcttttccagagcaacagcagctctgtaaattcccatacacgctccaaaggagtccggatctgaaatcttatgtcccatgacaataacctgatcctttgccacaatgaactctctgagtgcctctgctttaacacgggcttttactctcgtatttttagctgtctgctctttcttgccaccaaaatacgtgattcctttacaatccttgatcaccgcctggtctcctcctcttgccagtgcaagatcgatcgccatacgggcataattgtaactcagcgcataagttgctgtattcagtcctaacccgatgctcaaagtagcggatcgggcatttccgatgttgacctgcttgacttcttccaggagagaaaacttatctgcttcaaacttacggtagctttcttttttcacaacaaagaaatatttatcattctccagtttttttacaattccgtccacatcattgatatacttattgatctttctgtcgatcagagcgaccaaaagagactgacggacttcttccacactctccatcacttcatcatagttgtcaatgtagatcagcccggcaataagcctctgatcttcattttcacggatgtaagaattcagttctgtcacatctctcatataaagtgcgataaaatactctttttctttcggaatctgcagcatccgctcgctctcgctgaagccctccagggaaatcctgcgcagctccacctgataatcccgctccttatatgtgatctccagctcatttctggtctcatcatccttcggaaaaattcccttgttcaattccgggattatcttctggataaacttttctcttccatccacgatttccgaaaaacggtcgttcttccataaaatatgtccatcctccagaatgatcgcatagggaacggtcagttcctttaacagcgtgttctgaattcccttgtactgtgttgagaactggatcaaatctgccagaataagagagcggttgtaaaaatataacaatccaacgatcattgcataaataatgacgaataccgtcatcgtaagtccggctttttgatccgtcatatacatccagatattcattgccaacagtaagatcgtcatgatcagcggccactgcatgtacatcctcagctgcccttttaaacgcatgtttttgttcttcatgatttcctatcctctatccatactttcgtttgcacagcctccccatacgctgtgatttcacaaactcagtcttagtataccacttttttgtctccgtgtcagctttcatccacatccggttccttcggccgatatatctcaccggattcccggtcaacagcaattccctttttttccagatgctcatagacatccccacggagaagtgcatacagcacggaaacgattggaatgaaaaccagcattcccacgattcccatcagactggctccgatactgaccgctgccagcacccagatagacggaagtcccacagaactgcccaccactctcggatagatcagatttccctcgatctgctgaaggatcaggaacatgatcacaaaaaccaaagccttcatcggcgccaccgtcaggatcagaaatgctcccactacgcagccaataaatgccccgaaaatcggaatcagcgcagtaaacgcgatcagaacaccaatgagcatcgcatatggcatctgcaggattcccatacagatcacaaacatcgttcccagaatcacggcctccagacattgtcctgtcaggaaattcgaaaatgtacggtaactcagagaacaaacatccagaacctttttcaccagatcttctttcatgtatgcatacatcactttccggatctgaatatttaatttttctttctgcaacaaaatgtagcacgcaaaaacaaacgcaatcacaaaggttgtaattccactggcaatccttcttgccactacaaacgtagagccaagaacgctgctcgctccactcgtaaaaaacttcacgacttcatttattattttgtcccaatccagcgtcagactgtccagccattccttgatctccttattgttatggaaaatctcttctgcccagctctgcgctttcggcataaatgactgtatccctttcccgattgatataaaagtgtcccccagcttcggaagcactccgaataccaccagcccgatcacactgactactacgatcagcgtaatgatcagactgaccggacgcgccagcctctgtgccacttttttatttttcatcatttgattttgaaacagcttttcttcaaaaaaactcatcggaacattgatcacaaatgcaattgcaccgcctaaaagaaacggatatacaattcccactccctgtccaagcacatccagaattaatgaataattccacaatgcgatcagaagaatcactgtaaacacgatcagtccccgtatcttttttaaattttctttgtttagattcatactttacctgctctttctgtcattgttcagattctctccatgattccatcattctaacacagaagctgcatttgttccactttttattgctctttttatataaaaaaactccgaacctgtcactgacaagccggagtcttttgttcgtttataaaagcgattagtcctgtacgtatggcatcagagcaatgtgtcttgctctcttgattgctactgtaagggctctctgatgttttgcacagtttcctgtaattcttctaggaagaatttttcctctttcagaaacgtactttttcagttttgctacatctttataatcgatttcgttattctcttttccacagaatacgcaaactttttttcttctgcgtgcagggcctctctttttgaagccgccttctggtctgctacctttttcgtaagccatcttcattacctcctgttttgataactatggcttttgaagttagttaaacggtaattcttcgtcgattccgtccggaatgttcatgaaaccgttccctgcatcaatacttggtgccgggccaggtgccggtgaagactggaatgaacttctgtttgcttcgctttctgctctgctctcagcaaattcctgatcctctacaatcacttctgttgtgtagactctcacaccgtctttgtttgtgtagcttcctgtctggattcttccggaaacggaaattctcataccctgacggaaatatttctctgcaaactcagctgaacgtccgaacacaacacacggaataaaatctgcagtcggttctccatctcttttgaatctgcggtctactgctactgtatatcttgcaactgcagttgcactgtcaccctgtgaatatctaacttccgggtctcttgtcaagcgacccaccaaaaccactttattcatatatacctctcttctcttatgcttcctgtcttacgcataaatatctgagtacgttgtccatgatgcggatacgctgttcgatctcacctggaacactcgcgtcagactcgaagtgtacgaagtagtaaaatccttctttcattttctgaatttcgtaagcgaatcttctcttaccccattcatcaacgtctgttacgttaccaccgaaacgtgtgatcatctcttttactttctcgatcacagcagctctggcatcgtcttcgatttttgcgctgacaacaacagctaactcatacttgttcatgttctgcacctccttatggtctctggctcccggctcctccgggaacaaggaaaattgtgtccgctgataattcagcagtacgtcacagtttcctattttaccataagaatctgctcgtttcaagactttttcttaatttcttttgtattcttttctaccagcctgcgcgccaccatgatctggtgtccgcatccctgacatttcagccggaaatcagctcccacacgcagcacctcccattcacagctgccgcacggatgaggcttcttcatccggattacatctcccacattaaatctgtctgccatgtcctactcctctttgatcaaaactccctgcagaagaaatctttcatcttcattgacatttgtacaagtagaaagactgacgatcttggaatttctgtctactcccggagacgtcacataattggacgtactcttacactctgccagatatgcttcaaactcttcatctgtcgtaatattcaggttatagacttctgccgaatccttcactactcttgcagaaaagacctcgtaagtccgtgtctttccgtccggtgtgtaaatatagaaatacggatgcgccttataaaaatcttcacttgcatattcattcagctgggagaacatctctcctccgactttcatattgtgtccgtaaataaacgtattccggtcgctgaaatcattctgattgcgcatatccatgaaaattgctcccagtttgttgtcatttgcggaaaacgtctttgtcagatattcgttattatctgcactcttcacaaccggatagctgatgatcgacggctggtcaaagcgcagccatgccacggtatccggattttcctgcatcaatttgtcgaaatccacctgaaacttcggagcttcttccactccctccccaatcttgtcgctgacgatggcaagatttttgatctcgtcatactcctcaccgccagtgtagtacggaaccatcatcattgccagctgatacgcggaaaacacaaacacacaaagcgcgatcagaagcactgtcagtgataatggatcccagccttttttcttttttcttttctgctgctttttttctttcatttcaacctcttctacctgtttcattgttgttattttttaaaatcccagagactcattcaccaggatcactttgattcttcccggaatctgactgtatcttgtaattaagatctgagaacagatacatccctgtttcttgcagtcaaaacaggttccgcccgaaacacacggcgtctctttctgaaaccgctgcgcattgatcggcgctgcctcatttcttgcccggtgcagtgcatcctcctgtgtcttgacaaccttgttcatccccacgatcagaagaacattcttcggaccatacgcataggctgccacccggttcgccacaccgtcgatattcacaagaacgccgtcttcacttactgcattggtgctgcccagaaagaaatcggcaaaaaatgcttgatgcatcatttcttctctctcttttgacgtctctgtctgatctctgtcatataacgtgtaatctccgtttcgaatgacatccatcagtccggcttctgccacgctcatcgttccgccccagctgatcgtacttcccttcggcatcagctccagagcttttgcgactgcctcttcctttgtctctacataatatgcatccatatttctgctctttaaggcattcacaacccttgccccaaggacagcgtttctcatacttctgacatccatcctgcattctcctttctgatctgtgcaagcactccgtagattgcatatgcaactccaaactcttcattggactttgtgatatattttgaaaccgtcttcacttccggcattgcattctccatcgccactgttgctccaaaatccatagacagcatggaataatcattcaggctgtctccaagaaccatcacctcatccatcgtataccccagtgattcgatgtactgttttaagaccggtcctttctgtgcctccactgccgtaatctctaagtttgtcttaaaagaggaagccactgccagttttttatttttctccagttttttgctgatccttgccagcatttccaggtcgttggaatacaaaaatactttgtagactgatacctgcgactcttccagttcttgaaattcggagatgatcttcgtattttctacgattctccgatagagaggggaagataaaacagcactctcatccgtatcctgaccggtatccatatgaaacagctggatctgtttcaaaaaactttcttcgatttcttttttcgttccgatccggtagtcataatctccggaactgaaaataatcgaaaccggaaattctttcagattttcgtaaatctcctcacacaactccatcgaaagcggtgctgtactgacgatctgctgcttttgatcccgcacttccgccccgcttccgacaatataatcacagacaatatctgtttcttttaattcttccattgcgcctttaaagtttcgtcctgtggcgatcataaaacggattcccgcatcgcatgcctcatggattgcttttaatgtctcaggcgctactttatggtcattaccaagaagagttccatccatatcgcttgctattacttttatcatggtgttctcctgctttccattcttctgatgttattgttcccaccagtaattttctgttgtttcatatgtccataagaattagcataatgactgtcgaacagaaagtcaacgatttttcatctgatttttatgacaatttatgatttaatcccggcatttaacaatgtttccacttcctccatctgcccgagaatcttctgctgccgttcttcaaataaaagccctttattataccggtagtacgcatcggatccattttctttgataaaccacacactgtagtaattcgcatttaattctgtaataaatgccaccatctcctggctctctccaaatgcagtctccagaaacgcaaacacatgctgcagcataccggctgcctcttctgtctgttcctccagcctctctgcctccgcttcaaactgtgatttaacttcgtcataaaccgcttctttggaaccggatgactcattcacacggattctggcagtttcaaaaaacgcttctgccttctgcatggttttctcttctgtgcgggtcagctgctccgctttttttcctgcttccagatcctgcgtaatctgtccgatcaccgtttccaaagaccactctttctgatgctcccgatataaaagcatgtattcataaattttcgtgaccatggcatctgcccgataacaggctgcaaacgcctcgccaagacggccgctcaaaagtcctacgatgctcagatgctcatccagcggcgcattcttgatcttctgaattatggacggattccattctccttttaacagatcttccactgcataatcctgtttgtacttataataaagcgccagatagtttgcaaaatcttttgcgatcagattgtgctggatatactgatagaccacatccctgtccactgtcttttccagcatctcatacacctgtatcagttgggataaatcttcccagcctcttgctgtcgcaaatacttttccatccacggtattctcaatccgataaaaattctttctgcggatttcaagataagagatcactgccgggtggattccctgacgatatgcatattctttccatacttcgaaattttcctccacatcgatccgcttaatacgatccagtgtcaccacgtcaaattcacgtacggatttgttgtactccggtggatttcccgctgttacgataatccagccttccggcaccttctgatttccaaatgttttgccctggagaaactgcagcatcgtcggcgccagcgtctccgacacgcagttgatctcatccagaaacaagattccttcccgaattccggtcttttcgatcttgtcatacacagatacaatgatctcactcatcgtgtactctgttacagataccgtttttccaccgtactctttttcctgaataaacggcagccctaccgcactctgtcttgtatgatgtgtgatcgtgtatgctaccaggccaatacggcattctttcgcaatctgttccatgatctgtgtttttccgattcccggaggtcccaccagaaagatcggtctctgacggatcgccggaatccgataatctccaaattcatccttggccaaatacgcctcaatagaatctttaatttcctgttttgctcgctttatatccatgtatctcctcccatttctgattcttctataataagcttcaatgcccaggccggcacgtccacatcccggtaatcctcctgcataaatacaaatgccgtcttgtatgccggcattttccccggatagattccgtaaccgtctgtaaaatagagcagtcccttcaattcttcaaattcatgattttccaacatctgatccacatatgcaaatgccggacgaaaatccgtcccgccctctccgtacaactttagatgctccatatattctttcaattcttctttgcttgtgatcttttggtcggactgcacagtctcatcacactgcaggatatgaatgttggtctttttaaaaaagctgtcctcttcacacaaaatgccatatgtctcttccagaaattttcgtaccagattttgggaacaggacatggatgtgtcgatcacaatcacaaattctgcaacttttttgacttcttttgtttcctgcggttcgatcagcggcatatttccgtacatttgaagtccataactgtaaaacgtataatcgaacgtatccggatccacaccgatttcctcccgaaacaccgcaaatttccgtaaaaattcccggtaatcctgtcgtttcctgttttcgatttttacctgatccagaaaatctccggtctgcctggatgcctcttttgaaaatatctccagatcggtctccatctcttcattgatctcctgccatttctggttcatctgcgggcttggcttctgatccggtttttgattctcccagtatctgtggtcatcctgataaaactcctgctccagcttcaacaattctttctcttctaactcccaagcagtcagaatccgatagatacgctcggcattcagaacttttttctctgcttccagcttccggtaggtctcccgtctgagaagactcctggaaaatcggacacttctgtgataaatcccatctatcatatgctctgctgcaatatcacagctcaaattccaatagcgcccgtccatgccctgtttgataaaatgccggaaaatacagtgaaacaccatgtgcagatatccccggttcacaagaatccgattctgccggtacaagcccccaatctgctgcgggtgaaaatatatcactgctccatccgttccaaagggactgacagacgaatccatctgatatacaaaactgctcagcgccacatccagaaaacgcattcccagatacagctcatcccttgcagcacctaaaatactgctgccgatctgttgaagcttttcggctgcttctctactgttttcttcttccatacgcatatatcccttctattatactgtaaatttacaacacaaattttttctttctgaccggctgcatctgctgccgttcattcataagcagacttaaaatctccgacttctgcttgtcggaagcgcactcgattgccatgtccagcccctctggtgtccacagtttttctccggaaatcaggcgtatcctttctgtctgttcattcttgatcagatatggaacgatttcttccaaatgagacctgatatatccctgataagctgtttctccccttgtcgaaagccggatgggaaacaaaagcctcccgaaacacagatcaatgagtacaggcagcttttccatcaccactgccatagaaaacaattcatcatatttctcgtaatccaactcctttgccagaaaacactgccggtaattgtttcccgaaccatgatgctgggtatacaaaatccgggctggcgtattctccactgcttcttcataatgccccggaaataccaactccgctttctgaccgccaaatgctccgttttcgtaaacgaaagtcacatccattctctgccaaagctctcccagaatctcttttacacagcttttacttccaaattgcaagtgaacaatcagtttctgtaaatttccgcacactgtaaacgctccgcttccgatctgcatcagattgtccgagaattccagcttttttaagtttctgcatccataaaaaatataacgcccgatctcccgcatggtattgggaaaaacgacttcctccaccgcatcgcctgcaagcagtttttcctctgccgacctttgtccgatctgatccgtatcatatgtctgtacatcaatctcttccttgtcttttcttgcagaaaacgcatagggcgctgcctttattaccggtttcccctcaatctgctccggaatgacaacctgactgtctgtcccgaaacaccggacgatctctatcccctctccggatactctgtaatgtattctcatagaactgcttttttcctcctgcggattgttcttactaagaatttagtttaccatggattgtcaagttcaacaacttaagacagcagttgatgaaggaatcccggaagtcatatgatacatacgaaaaaacagtcctaccttgcgatagaactgttttttcagagctactatatttattagatgcctatatcccgctattcagaacccgaagcagcatatccccggttcctacattatatccgcttgccgaatacaccccctgcattccttcttttacaacaagaatcaacggcagcttatccggatccccatacattctgcgcgccagtacattgatattttccgttccttcatcatagtacaccgctgctcccggcaattctgcctttgtttttgcaaatgtcggatctacctgatcttctttatgtttcaaaatcagatttacccggcttccaagcgctgcaaattcctgacttctttcacggagttcgtttaaaatatgttccgttggttcctttccaacctcatgccagataaacaacgaggttccctctttgactttttgacttcccaaaattttggttccctgctcatcttctaccgcaaattcttccagcggaatctcttccagcatatccttcagctccgcttttcgaagagtcagctggatttcttttgtctgaccattttcgatgtcaaattctgtgcaggcagcaaactggttcccgttcggcagacggtttgttgtgatcacacggtatgtccccgcttccacttccagttttgcctctccctgatatccttccccaagctgcagggtctgccagagataacctgtctctgattttttcgcaatcgtccagttctgcatatagacccatctcgtatcgtccccggattccaaatggatctgtgctgttttttcacatacttcttctgttttttccgagttttccacattcaaaaatgcgttttccccataatactgcatttctccatccagtggatttaatcttgccggaacacccagtgtacggcagatcgccacaaacaacaccttcttcgattccagacttgccctctgatagcgaagcgttcccgccggggttgttaaaagctcttcatattcatatgccggttcttcctgaatgtttttgctgatccaattccagatctctcttggattcttctgaaactgtgttttctgctcttctgtaaaaaatgcctgaatttttcttctgtacgcactctgctgttcccttgaaatccttggatttaaaacatattttgcaaaaatctccgaaggaaacgtatgtccccatacacatgcctcctcaagatgctccaaaagttcctgcgccttacagtctctgaaatctttcaggctcaactgatccagaagcgcctttttccaaagtgcatttggtgtttctgcatcgagaaatttttgaatttcctgatgatttcccttactgttttccagtgcgttccctgcttcttctccaaagaaactgtttactttcgcaagccgcttttctgtcgcctgacggaatttttgcgcacctgtctgcttctgctcttctgtcggtcttttcgtgttaacaggagcatccgaaggtgcgatcatatcgaacgccacccactcctctgctgatttttctgctttttttcctgcaagaaccagtgtctgcgcagaaatttcacgcgtatccaaaatggcagtcacatgtctatcttccttccacacggaaacaaacaggcttccttttccggtcctgagcacgaccttcccgtttgcatctgttttctttcgggagattgcaaccagttctgcataattcaacagttcaaagctaacttccgcatctgccaccggagtcccgtcttcttctgtcacaaacagctccagatcaactgtttttgcatatctggaaagctggttcacccctgaggtcacatccggatgttcaatcacatctccgtctgcctgttgtgaaccgaaaattctggaattgatcatcatggagcgggaagatgcattgacgaaccatcccagatccagaatctcttccggctcacaggctcccagaaaatgccacgttccttcacaccatacttcgacccaggcatgattgtcatcgcaatgtgcccagcggtgcgcatatacctgccttgccgggattccgatactgcgcagcgcatttaccgtaaataccgactcttctccgcagcgtccgatcccgtttcgatacacggcctctgcagagatggtacggtcatccgttgcctgataagtggcttcttcggcacaccagtagtttgtttccagaatcgctgcttccatctgttttcctgcaactcgcccctttaactgcccataaaataaaggtctgcaggaagtaattccttcggtattgacacggtggaataccacattgtccagaaaaatttcatccggaatccgggtttctcctgcccatgtctgttcttttctcaaccggacgccgtgcgctgcaaattcccggaacatttcatacggataatctgccacatcactaaacggcatattggcgtataaatattttaaaagcagcgcaacatctgccggctccgcatgaatcctggcctcaatctcttttcctgccctctcaaatttttccgtgaaaacagcaaactgcttccgaatgttttcttttgtctcttctaaaaacatgtctcttctcctcctgccaacagataatacaaactggatgttcccgcagcggttgctccctgcggctgtccctgatacaacgggttgtctgtccatgcggttcccgcgatatccagatggatccaaggacgtccctgggcaaacgcctgaatgaacagacctgccgtgatcgttccacagtaatcccgtcccatatttttgatatccgcaatcttactttcgatcatctgcttctgttcttcaaaaatcggaagtctccagtagcgttctccgcttgtctgtgctgcctttaaaaatgctccgcagaacgcatcgtcatctgataacaatcctgctgtggaaaatccaagcattcccacaactgcaccagtcagtgtcgcaatatcgatcacccggtctgcatgctcatccttcaccatatatgccatagcatcggcaaggatcagacgaccttccgcatccgtattacagatttcaatcttctttccgccataggaaccaatcacgtctcccggaaccagcgcagacgggctgatcctgttttcacacatcgggattacgccggttacattgaccttgacctgatttgccgcaagtgcataaattgccgccgcaactgccgcaccgcctgccatatcgcctttgatccccatcatggatcctgccggtttcagacagtacccgccggtatcacaggtcactccctttccaaccagtccggttaccggtgcctcttcgtccccacgatagcgcattaccagcatacacggtggattctcactgctctttcccacactggtcagcgcttccatgcccattgcatttaatttactgtatacgatcaattcacattctacagatgtttctttcatatgctccatgatctctcttgcaaagtccatcggatgaaacagatttcccggtgcattcaccatatttcttgcccagctctgtgcctctgccagagaaatcccctgttttaattccccctgcgctgccgggtacagattttcatcgattccagtcagtgtcacatccggaatttctttcggttcctctcccggaagacagatttcataagctccggtataaattccttcgatcacagcactgactgcccgcacacctgctgcttcaagaaacggacggatgtccatctcatacgccttgatccccattcctttcaccgcgccggctgctcctgcggacagttcctgaatgttacggatcgtaagcggttccttcccctgtccgatataaaccgtcagattctcatccagaccgcccactctggatactgcctgataatctgctgacacgtatgtcagattttctgcctctttttttccgataaatgccacccgtacggatgccttcttttgttctgctaatacgatcacgttcgttatcctccttctatgtcaaatgtttgaatccttttcctgctactttttccgcttctgtaataatcaccagtgctttgtcatccactttgtggatccgcttctgcaaaagctcgcattccttcttttctgacacgcacatcaccacacgctgtacctcactggaataaccgccttctccttttaatacggtcacgccgatcttcctgtccagaaatatctgacgtaccttatcggtagattcggcgaccacgatcatcagattttttgcatctgcattctccagcatatgatccatgaacattcccgaaatatacaccgtcacaaccgcatataataagctttcaatattacgatataccattgcagaggcaagtacaaccgcaatattcaatcccgagatccaggcgcccaccggaaactgcggattgcatttctgcatgatcagtcccagaagagaaatgcccccggtgttggactgtcccatatgcaccagcgccagaccaattcccatcatagctccgcaaaacatagccgccagaagaggatttcctttgtataccggaatcctgacgatcaccagatctgttacaatggagagcagggcggtagacgccagggtgcgaaacacgaaagaacgcggaaaatattttttgaccacaatgatcagaagcagcggaatattaaatacaaagacaaacagaccgatcggacatcctgtcagataattgatcaggatcgcaatgccgcttgcccctccgggtgcaatcttgtgcggcgccgcaaagctgttgattccaaccgcataaataaaaacgcctgccagatttaacagcacacaacggatgatggtctctttttctgtcttccagttttttgcttccaccttgaacctcctgtagaaaagggatgtctgaaaacctgtatccctatacaaatttccagaacatccccttcttttaatattgaatacaaatcatctgatgtccgtctactttttttaccgaaaatttaacgtatttgccttcctgaacaaaagaaagcggcgtttcatccggaacacttctgacttcttttacctgttttccatctgtatttacctgaatttccagatcatacaaaggaatcttgtcttctacggtatagatatcttccgatctcttctccgtaatataatgcaggatatgcagaacatctctgtttttctcttcctgcgcattcaactgaatattcagtgtagacgggccttcatatctgaccagcttttctccgatgaaatattccagcgcatctttcaccatcagcttgcaccatcttgccgcatttttacggtacagtgcaaaaaccgggtgggagaaatacagcgcattgttccagatcgtcacctccgggcttcccactttcccggaagacggtgcatgctggtgtgaacagaaggtgtttccttttctgtcaaaatacggctctatcttatccataagcacttctgcatgtaccggttttacatcatatcctctcaagtacatgacaaactcttcttttggcagatcttttccgatcacgtcattcggcatcacaaattctctgtaatattccgattccttctcaaatgccacaccgtaaatgctctcacttccgtcttttggcagacaggaatcaaaagaaccgatcacatgaccaccctgtgccagatatgcttccatcttctgtttcagatcttcattataataaatgcagtccggaagaatcactacctgataatcatccagcggcatctgactgtcaataatatcaaactgatagcccaactcctgcaggatacgcaccgttccgatcaaagatggtgacagaacagaatcctttgcatcctccggatagaattcctccggtgtgatcactgcgatctccgtccgtgctttgacatcccggcaatacggctctttttcctctacgcttttgtaaacattcccgatcaggtcgtaagcgcctttggagagcacacctcttggatgaagctgatctccgatggagcatcctgctcccactgccagcatatggaaacattcatattccaacgctgcctgatttttcagagaatggaaatctccccagtatgtatggaattttccggtcattccaatcatctcttttccgagattacgggcatatctgctggttgccgggaagtgatcatatccccagccgccgcttggcagagattccagctccagatggctgtattctttaaaactgttcttgcttcttggtcccacatgagatccattgtaaaagatcgttgcctccggcgccatgctgtggataaattcgctgatctccgtcttaaattcatccagcatatgctctgcgtaccgcatccgttccactttggattcggtatccattccaagctcctgcatcttcctcacacaatgctcacacttgcagtctacctggaacagaatatccataaaaattccatccagattttccacgccgatcacctcgatcatatcctgaagctgatccttgaaaaattgtctgtaaccgctgttcagacagatcgtgtgataaaaatgcggcgccggaactccctgggtatcaataaattctccattttcatctactgcaagccactccggatgctcgcgcatgattcttccatcccactgtgcagttgtataaaccggcactttgatccctctcttatgacacgcctcgatctgctccagtaaaaagtttttgttcttcaatcccgggtggatgagctccggaaatttttttgacggatagtacagccatccatgatgacatcttgcaaaacatgtaatggaatctacatgtgcttcttccaatgtttttgcaaattcttctttgtcaaaatctgctgcgatatccggtatgtactcacttgtatgaaaatccagatgcacctgtctgtatctgatcttgctcatttttgtctcctcctcatgctgtaacgattattcttttacggcacctgctgccagaccaccttctactttctcctggaataacaggtagatcacaagcggaacagcaactgtgatcacgattgccgccatcaacgggccgtaatcacttccacgctctccgttgaagttcagaagtcccagtgcgatcggctttaagttcttgtcattgatgaacagaagcgggaacagaatgttgttccatgcacccaggaagttaaaaatagaaatcgtggaaatcgccggtactgtcatcggcagcatcacatttttataaatctggaaataggttgctccatcgatcagagctgcttcttccagagaacggttcacacccttcataaagttggtcacgaccagaatactgaacggaaggctgaatgccacatagatcataaccagagccgggatattatttttcagattcagcgctccgataatgtaagaaaccggaacaagtacagtatgtaccggaaccatcattcccaacataaagaataacagtaaaaatttgttgcatttaaaatcaaatctggacagtacgtaggctgccattgtagacacgatcgcaagtacgatcactgtcgctcctgcctgaatcaaactgtttaaaaagtagtgactcatgttggcacttgtccaggcttccacatagttggaccattgcgggacttccggccaggagaatggtttcgcaaaaatttctacttttgtcttaatggaagacaaaagggtaaacaacatcggggttgcaaacatcagcgctgtcaaaatcagcagaatatacatgatcacactctgcagcgtaattttcttacgagtttttactttctttttcatgtgttcttccccctactccgctttctttctgcttgtgatcagattgcttccaaccgtacccacaatacagatcaccatgataatgattccgatcgcgcttcctactccgtaatggttgtacttaaacgcctcattgtacatcaatgttgtcggaaggttggtcagaccgttcggtccgcctcctgtcatggcaaatacaagatcgaatactttgacagatccgatgatatccatcagaatacacattgccaggatcggtttcagcatcggaactgtgatcttaaagaatttctggatcgatgttgctccatcgatcgctgccgcttcatatacatcatccgggatggtcgtcagaccggctaaaataataaccatgtaataaccaacacctgcccagacattgacaaatacgatcgtattcatcgctgttgcaggatctaccagccatggcatcaccagatcgctgagtccgatcacttccagcagagagttgaaagatccggtcggcatgaagatgaaataccacatcagaccaactgcagtcagcgggaatacagtcggtacgaagaacaacgccttaaagatccggtagcctttacactttgtattgatcgcaactgccatcaaaagtgcgatcggggtatgacagatcacactgatgatgaccattcttgccatgttctttaaagaaagaataaaatctgcattgtgaaatgcatcgatataatttttcagtcctacaaatttcggcgcagatcctgcaattccgttccagtcaaccagagaaaaatagatggaaccgataatcggaataatctgaaataccagatagatcacaagtgccggaacaagaaacagcataatgctcattcttgtctttttactttttaactttatcatccggaaacctcctgttctttaaaaaaatgccctgcacaaagctgacagggcatttttgtacgtcctattttattgatacctatttatcaatctcactctgaatctcttttgcaacgctgtccggtttttctccggtgaacatgcttgagatagagtttcttgttcgatcctgcatagaagccagcggatcaaaatcaaatacatcgactccgattccctcagatgttccgccaagctctacatttttggcaaacagtggagagatcgcactttcatccagatcaatgtctgttctcggaatcaggaaggctgcttcctctgcaaatctcttcgctgcatctttgtctgtcagcatttttacgagttccagtgtaagctccagttcttttccttccagttttccgctgatcatatacggagacaatgtctgcatatcttcattcttaaactccggtttttcttcaaagtatgggaattttgcaacttcaatgctgtcacataccggtgtctctgccggatcttcaaaagttccgatattccatggacctgtgattaccatcgcagcttctccctgctggaactgtgtcattgcaatattgtctgtcatacctgctgcatttttgtcaaatgcgcctgcatcgatcagatcctgtacaaactggagtgtctctaccacttccggatctgtccatttcatgtctctggaacctaacttcttcgcagcatctgttccgagccatttgtagaatatctgatcatgaagatgtcctgccatataagttgtctgtgttcccattgcgatcgggatcacaccgctggcttttaacttcttgatcgcatccagaaattctgtccatgtttcagggaattccttcacgcctgctttttcaaacaaatctttgttgtaataaactccgatcagcccggattccatcggaatcgcataagttccttctttttcaggcacctgataataagagagcgctccctctgtaaatccgccgccccattccggatcttcgtctaaatatggctgtacatccaggatcagcccgttatcgatatattctgacagattggcaacaccctggatacggaaaatatttgccattgttccagatgcaatatctgtcgataaaatattgttgaatgcagattcatccccctgtgaatcgtcaacgatcgtcacttccggatgtttctctttaaattcatccagaatatcattgtaaatatccacctgcgctgtcgttcctgccattcttgtcaacagacgaatcgtaatcttatcgcctgaacctttttcgtctccgtcccctttgcttccgcatcctgccagaagtcccacgcacatcactcctgccagcagcgccgctgtgattcttttcaatttcattcctttttcctccgttttcctttgaaacatttatgtgatgcacctagtatagaaaataagcgggtttttcacaatgttcattttctatattttttgttctttttcaatatggaatctcaaataaacttattttgacatttcttcctacattctctataatgattttaattctgttacatcgactatactatggagaattcctgcaatgaaaaagatcaaacacaacaaaaattccatcagctttagctttttccgaagcatatccatgacttctatcctgttcatggttttgctttttttagggatctccggtttatttctgaagcattcttttcgactggagggaagaaatgctctgcagcagctcagctatatttccggacaatttcaatattatctggatgccacggaaaattattccaaaactatcctgtctgatgacactgtacaggaatatatgaaagactatcttgccgcaaagtattcttccaatgcaacaaccaatgtcaagcagcatatccggcagatcatacagtccacaccgttcatccattctgtaagtctgtattctgatcagggacttcttctggtatctaccgagccgaactcaagtcagatgaatctctgtgatccggctctttctcctgtctggcgggttggtatgaaacgacacctgaacgacagacataaagaggtaaaagtcctctcctacattcgcccgttctataatatcaattccggacgaatgctcggatatgtagagctttccataccagaaacacagatttccggcatttataaacaatacaatacaaccaatgaactgtttctgatcgataaaaacggacaggtccagagcagtaacggcaatcccgaactggacacccagtatgaatatatggatctcattcttaaaaatctgaattcccagtatttttttgcaggcggaaatctgttgtttttcacacctttttctacccttgactggtatgttttaaaccagatcccgatcgtcagctttttggcgcctctgttcgcgatgttttgcctgtctctgctgattgccgcactggttatggtgctctgtgtatttgcttctcaccatattgcacagaaagtcacttatccgttaagctatctgatctcgcatattcagacagtcaaggagggaaactgggttccgattcatgagattccgtgtaatgacgaggttgcttcgcttctcagctctttcaacagtatgatcgcgatccagacgaaaatgagagacgacctgatcgaagctgaaaaactcaaacagcagctttccttaagcctccttcagcagcaggtaaatcctcattttctttacaatactctggataacatctgcgctctggcggagcttgatgaaaaagaaactctgattcagcttgttatgaatctttcttctttttaccgctccagcttaagcaatggaaagatgcatatttccatcggacaggaactggaaatttccagagcatatctggaaatcctgcagattcgctatttccataaattcgatttcaccatcacctgcccggaagcgttaaaaaactacagctgcatcaaactgctgcttcagccgattctggaaaacagtatttaccatgggatcaagggacttgaccggcacggaatccttcatattgaggcggaagatactggggattgtatccggtttacgatttcagacaacgggcgtggattttcaaaagaagactatgaaaaaatctggcaggaggatgctgaccactttggaatcaaaagtatccagcagcgaattttgctctactacgggccgggttatggactgtccatgcaaagtccccaaaccggcggctgcatcaccatgatcacattacccaaacaggagggattgccatgtcattgaaactattgattgcagatgatgaatattttattcgtcagcgtattaaaaagatcataccctgggaaaaactaaatcttatttttgccggagaagccgaaaacggacagcaggtcatcgaccatctggaaaaagaacccgtggatctgctgcttctggatatcaaaatgccgcatatgaacggaatcgaaactgccagatatatcaaagagcattttccttctgtgcatatcctcattttatcgggctataatgatttcgaatatgcgcgcaccgcgatccggtacggggtaaaagaatatctgctgaagccggttgccgccgaagaactggagcgggcgctgtctgaatgtattcaggccattcattccgaagagcagacccgccatacattaaagcattatgagcactttcatctgtgcagtatgcttgccaatatccgggacggtgtgctttcctattccgatctgtgtgtacagcatccggaatttgaaaatctggcatacagcatctattgcagtgtctatgtttcggaacacactcacgatgcagtattacagctggtggatcgtctgcgcaggcaggattttctctgcgaatatatgcaggaaagcgaatacatctacatgcttcagattttcctctccgacaaagaaaaactactccatatcggaagttgttttacggattttattgcacagcaaaacgaatatacatttttgtacattgaaaatatctttcctgttacaaccgactggaagccatattacacccgctgcctgcaccttctgacagaacgctatttttcccgggaatccaatctctgcatcagctattctcatccggaaaggccaggattttccgaggaactcttaaaaatgcggaagcactttatcaccgttttgcacgcccagaaccacaaagatctgctggaatatctggaaacactgttcctttccatcagtcagaagaaaaacagtgagtatctttcccttgtgatccacgagatttttgttgtgtaccatgtgtattttcatattccggaaaatctggctcagcccgtaaccgagttctccgcttccatactggataccgaacattctctggagaacctgaaaaatgaagttctgttttacggactgcagtgcattcagaaaatggacgccgttccgtcagatatcgcactctgccgccgggtcatggaatatatcggaaatcattatacagatgcttccctttctgtttctcaggtggctgcgaattttcagctgcatccttcctacctgggaagcgtatttaaaaaagtacaacatacctctgtactccagtacatttccgatatccggatcagcgctgctcagaaacttctgaaagaaggcacgatgaaaatttccgaagttgcagagacatccggatattcggatgtgtactacttcagtaagaaattcaaaaaagcctgcgggtgttctccaaaagaatatgcggcaaaatacagttaaaaacagggatgtcaaacgacatccctagcttttctgtatataaatggtattactcatccttctttccagaccgcttccgccacttcacacactctgtcagcagatactcaatctgtccattcatcgaacggaactcatcttctgcccactgtgcgatctcatcgtaaagctccttggaaagtctcagtggaacctgttttttcactttacttttttctttcttttcattttccaaaatgtgtcccaccttctaactattttatatatactgtacacaatcgtcctaatacagacttccgctgtttacgatcggctgtgcatctttatttccgcaaaggacgaccagaagattgctcaccattgctgcttttctctcttcatccaattctacaatatcattctcgttcaatttgtcaagtgccatctctaccatgccgacagcaccttccacgattttctgtcttgcatcaatgatcgctgccgcctgctgtctctgcagcattgcagatgcaatttccggtgcataagcaagatgtgtgatgcggacttccagaatcttgattcccgcattctcaactttctcctgcaattctttgcacatgatctcagcaatctcctgggagcttcctcttaaggacttttcatctcctttttcactggtatcatatgggtacattcttgccgtgttacggataatcgcatcgcactgaatggacagataattcttatagttctccacattgatcacagctttggtcggatttgtcactttccagatcactactgcgccgatctctaccgggtttccaagttcatcgttgactttctgcttttcgttgttcagcgtcagtgtcttcaatgacactttctttgcttttcctgagagagctgccggattggcaaggcctgaggatgtaacaaccggtgctgccggacgtacagatgggttgatcgcttcacaaaatgggtttacccagaaaaatccggctgtcttgatcgttccgtaatattttccaaacagggcaaatacataggcttcatttggattcaatactctcaatccgcaaagttcgagtataaatcccacaatcagtaacactccaagaataatagaacctgccaacagcgccgtattcgtctcacctgtctgaccaaacaccatgcatcccgcaatgatcacagccacaccaagcagcatcccgatgataccaagtaaaagcatggcatatccactctttgctttcaatactttttcatcttgtactacacttttctctccatccatattcttgtcctcctcatatgaatttatttgatatcattttgatatcataatagtagcactcgtatcaggagttgtcaatgaggtgaaacgattttttctgtcagtatttacacaatctgtgccgtaagaatttcaaccagaacacctcttaaatctctgctgatatccattgcaaacagttctgacaaaatccccgcagccggacgttctgaccgtattagttcgtataacctgtctttctgcacaaattctatctctgcctgattcagaaaatcaaaacatctctccacaacatcatttctggctccggaagccgtatgttccaaactcacttcgatcatcgcatctgtttctgtctctggtatctctactacaattgcttttttccatctgtcataagatatctgagcatctgttcctacaccattttttctgaccacgaccgtttcaccggaattttcaaaaccagtcatttcaactgtataactccgtttctgaggaatcaggtcccgatttcctgcagacggatatattgtaaagattggtttttcatcttcacaatacaccatcttcgttgtacaacagattctctcctcatatgcacaggacacattgtcgtcttcatacagctcaaactcaccattttgccctgcatagaccatgagatgtaaggaatttggatttttctgtgcctgcactgcactgatttcgtctgtaaacgcaagaatacttcctacggaagcaaaaacgggaatactctcaatccctctgtacagatccagaattctgtccccatcgtatatcattcctgtataaatatcataccaacgtccttttggcagccatgcctgtactttcgccatatttattttttctatccgcggtgctgttatcggagcaaccatcagagaagttccgaagagatactggttcttcttttcataagcctcattacattccggccagttgtagtacatgggtgatatcaaaggtttattttcgcaatagctcctgtaattcattgtataaagatacgggatcatcctgtgccgttcccgcagcatatgattcatcaccatttctgcttctttcttataacgccatggttcttttccattaaattcactgctggaactatgaagcctcatgatcggcgaatagatgccaagctgtacccatcttaccgtcatttcatcatccttatatcccagcatatgaccaccgatatcatggctccaccaaccatatcctatattcgaagccgtaagtgtaaaataaggctgaaaatctagagattcccaggttacgattgtatctcctgaaaatccgattggatatctgtgacttccaggccctgcatatcttgaaaatgtcagaggtcttttcccctctcttgcagagtccaggaaatgaaaatgattaaaaatccagagtggatccagtccttcatccctgcaaacttccccctgttgccagtcgatccaccagaagtcaaccccctcttcctctctcggatgatgcagatactgaaaatatgcttccaaaaatcggggatctgccggatcacataaaatcggatcctcattcgcataatctactcccagagcttttgccatctctacatacatctcctcatgggcgcgcactccatctgcaggatgtacattcagagtcactttcatccctcttgtatgtagattgtccagaaatcgtgttggatttgggaataattcccggttccacgtatatccggtccatccgcttccatatttgggatcgatatccaccagatgccagtccatatcaatcactgcaactgtaaatggaagattctcctgctcaaatcgatccataagcgaaagataactctcttcattatatcggtaaaatctgctccaccagttgccaagtgcaaatctcggcaacataggtgtttttccgcaaagacggatcaggtcagcaacagcctccttataatcgtgaccatatccccagaaataaagatcctttccccctttttttctcgacttgatccatccatcttccagtaatacatgggagttgctgtcatccagaagagaaaatccatttctcgacacaacaccatgatccaatctgatctctccatcaactccatccagagtccgcgctgtaccaccaagatcacagatttgttctccatagtgccaggtactgttcacacttcctttcacatgtatactaagaccgccagatgaaaactctttttcatcatatacaagatgtaggcgggaggtattgatctctatcccgttttctgtatgaatgacgcggtaatccacctcggggaaatcccggtataagaccatttgcgtggctctgtcctcaaactctccatctgcattgtactcaagtctcaccagcccttccgtaagtactgtgattctgtattgatttcctatgatcatattttcctgtctcgcacagggtgatgtcttgattctgtatatcttctgcataacaacttcccttctttttgtttattcttttacacttcccacgacaataccagtgatcaaatatttctgcagagaataattattcaccttggtcatatagagtcaatccctgccttcttcagaaaagattggattctaaacgttcctgatcttcatcgtctacaatcagcatgcagtacataatacgacctctgccgtctgctatttctatcacaaaacctgccgtctgctctaagcatacgacaggttttcatctgcttcaacctattttttctttcttctgataatcactactgcgccgacagctgctactgctgccaccagaagtactgcccacatgatcacattggcattgtctcctgtctgcacactctgagagtgtgaaccggatgtacttccattgttatgacttccgccgttattgtttccactgttgttgtcatttccgccgttgttatcatttccgttgttgttatcatttccgttgttatcgtcgtccggatctgctttttctcctctgaccagaaccttcacatcagctttggctgttgctccgtttgtatccgttacctgaatggtcacgatcacatccgtatcgttttccggtgttgttacctttccatccagtccgatgattccttccggattcactgccacgatctcgatcttgcttccttccggaacttccggcagaaccggtctttctgttcctgctttcacttctgatggaatcttatggtttgccagaatgtcatttaaaatttcctgtgcacccggaacatgcggcgcttccactgctttgaattctccggtcagttcggtgttctttgtcacctcaaatacatatggattggactcactgatcacgtttccttctgcatcggtccagtttacaaaacggaatccttcgtttgccactgcgataacttctgctttttccccttttttgtagcttccgtctgctgaatcaatggttacggttcccatgctgttgtcattggttttgatcgttacatggaatttttcctcttgtggaggtgtcactgtttcttctgtcagttttgcctgcaccagcatccgtgcatttccttcgtcttctccgacatcacctgctgtgaaataatattccagtgcagaagccggtcctgtatagaatacttttccgctctctttgtcaaatgaagcaatctgactgttttctcccatcagaacttccgtcctctgcagctgttgaggtgtcagtacctcatttaaatctgtccagtacttttcaccgtcatatttccgttttaactcgatcgtctgcggagataactgtaaatccagagcctttcctgactctgtccatgccagatgattctctgcacaatacaatgttttcaggtttgaaacatctccaaactgcagcagtgacaggttattttggtttccataaacactttccggcgcagcactgtccatcttaagactgataagctggttgttgttaaaatttaagtatgcaatattttcttctgccccgatcagatttgtgatctggttgttttccacactgacctgttttgctgttccgaaacggaactctccggataactgattatttcctgcaagaaccgtttttaatgcacttgcttcatccacgatcagttctgtcagactgttatttgctgcgttaaattcctccaatgctcccagacctgagagtgagatctgctgcaggttgttattctgacaatgaagtgtttttaaatttccaagtccttctacgagaaggctttccattccattactgtctgcctgaagcacttcaagagccgctgctggtcttgcatccagtgtatgcagctgatttccataacagcttaatgctcgcagtgaagtcaggcctgtcagatccagatctgtaagatgattattttcaatccgtacttcttccagacttccaagtcctgtcacatgaagctctgaaaatgtactattttgagcatacagctttttcagactgctgcatcctgtcacatccagcacggaagccgcatttccgtttactttcaaaatctgcagagatgacagatcttttaccggtgtaaaatccccaatcgcattttggctgacatccacgcgctgcaaattccggaaattctccacaccttttaaatcggtaattcctgcattcggcattgccagttcttccacttccatgcactctgcttccgataggcttccatttccatctttgtcacaggttcctgcaaatgtcagtatcacctgatccggaaactgttctgcagaaagctcaatttctcccaccggtgctgcttccgtcacttcttcattctctggttctgtctccggctgttcaggagtttccggtatctgatgtgtctcattttccggtgtcttatcctctgtttcttctattgtttctacagcctgcgctttgatcgtatacaaatcgctgctcatcgttcctaaaatcattccggacatcagcaggtacgcagttaatttctttattttcatctttttccctcctactatctactgtgccatagtgacgaattctactgtttctgaacggagagattcaattcctctctcatttactgcagttacataaacctgatatgtagtaagcggggtcagctcctgaatcgtctgattcatttcttttccttcccataccatcttaccatttgcatacacacggtatgtacatcccggttcttccgcagcccagctgatatttgcagaagacgaagatttgctgtcaattctcacgtcgcttggagctttcggtgtttcccagttgtcctgactctgcgctccgatcaggtaataccaggaacctgttccatactctaccccatcttttcttgctgctgcccgcagaattgtatttttctcgactgtaatcggtccttcatattttttagcggactcagaaacttctttatttttctcaaatggctgactgccgtccagagtataataaatctctgctccttcacctgctgtcaatgtcacctgctgtgcagaatcatattgtccggaagcaacatctgcgcttacctgaatatccattgctgtaaaggatacttctgccgcttcagattcattgtcatatctgtccacagcttttacctgaacagtatactcgctgccagcctccaacggatctaagatcagcgcagtctgtgtaacttcacggaaaccaacctgttctccgcctttactccagcttactttgtatttttcgactcctgtattatctactgacggaaggaaacgaatttctgcttccgatgccttcggagatacgactctcagattgcccggcacagttggtgcttcttcatctttgatcaccacatcccctgtttcgcccattacttccagttctacaacgtggtttgtatctccctttgtacttccgttcatatatacacggatgtatcctgcatcaaaacgttctccttctttcggcaatggtgtttttgtatctggatccaaccaagacacacctttttcatacacttttatagtttttccatcttttgtctcgctgtattcttctttctctccttttggcaacttatgtgtctttcctgcctcaccatttaaagctgccggccactctctgtccgcatcccgatttccgttccacaggaccaatgttttagccggatcaaaggaactgtccggtgacagaagtacaacggtatcatgatattttcggctgtcactccaataccgatacaaattcacttcctctacatgatgcaacccaccaagatctacctgcaaccagtgtgcacctcctgtatttccgcccggatcagaatatccatctggattatttttctgtccgtctacagccattgtttttctatcatttgcacttacagaacttgaaaagctcacattttttcctcttgccagattggttctctcagatttgatcggctcatcttctattttctgtgcattctcatcatatacaaactccagacctgtaatggaaagatccacccagccgtttgtctggatcgtgataactgcttttcctgtttcttcgttaaattctacttttggttctgtgtactgcggctgtccgtctgtgtccggctgctgtccctttacaaccttcacttctggtttcttcgccagttttgtcagttcaaatgtagtggtacgcagctcattatcttccggagacaattttccttccggtgcgtttaccacattgtacttgttcatatattcatatacagataactttccatcgattgtaacttgtcccggcgaaaaatcacctgtccacttcaagttgaatttattatcaaaaataatctcatctttatttaccctgtagttattcagcgtgatatccatcgctgttccgtctccggattcattcatgatcataaattcgtgaggctccatctctactttcagacgtgcgctttcttcttccccttccagaggtaaaattgcatgctgcttttcatttgtattaactttattgttgtagagataccatgtgccctcccatttgtcagcaaatgcatttcctacatattcgattggatacagatctttgaaatacttctgttttgcctgtccggacagattcttgtctttgacatccagtacattcggaggggttacgcccagtttgtctgcttcctgaatcaatttttttgttacttccgctctggttccccatgccggaataaccggaataataccataacgtcctgtttcataaatctggaatcctgtcggttttccggataaaccactgtaaaaatcagaacttacatttccatagagcactgctttggtctcttccataatttcttttttggacggtgccggatgattgacaatgtaacggaacaattctgtcaggacatgtgtatttgccggactgttcgtgttacttgttccatatacgatttccgggaactcaaaggtatagatcacaccgccgcccagataggtgctcatcatttgcattccaagcaatgcttccggttctccgcaaagtctctgccagttattataacttccggctccttgccagagttttgagaactgtttgtcccatgcccatgtatcggaaagcattccccagcctccggtatatcctgccagccagcttccctggaagaaactgcttgttttcaaatcatccggttgatttgaacttgtgttcttataaatcaagtagaatgcatctccgtgtttttccagtgcctttttcatatttgcattgctgacaatattcgtcactgtagaaccgtgatcctgatctgaccatacaaagaatccaccgaatcggtcagcaatctccagcatcttagcgcttccttcgcatggaggatgaatacctgcccagaagttctctgtattgaacacaccctgcatattcggatacatacggtacatcagatccaaccagccgtaatccatatccgctgtaatattgtactgtgttcctccattttccggtgttgcagctgctgtcaatccaagaagcataatcggcgctccctgttcataggcaatctgcagcccatgttcatggaatgcctgcagataagcctgtccgatatgatccggagcaaactgtctgaggttgtttgtatgtaacagcaaaacgttattctctttcagatcatccggaatagcattccatcttccgtctactgtgttagaaccctgtaattctggtccttcttcctgtccgatccgatacacatcattggaatacgctgttgcgatcatcatcgggtgttcgttatcgatcacacgtcttggaccatcctgtgactgtacatcctgctccttttcatacccataaatccccagttccataaattttactgcggcacctgttggattctctgtatacactctgatataacgtgcctcttttgttgttccaagctctgtggccccaagtccattcttgttttcataatccatatagaaccactgtccgcccatcgcttcttcgtatggctttgaaacattctccggctgtttcaccccatccggaagtgtcggatttccttcataataaacgatctgaccgtccgataaatcctcttcgtttccaatcacaatggcagtatttttataagaaatcttggttcctttcagacgttttccctgaccactcggatttccatttccgattgtcgcctgtccatcatatacctgtcgtttcagattgatgacttccaacggataggatgcgcccagatccacctgtacccacacaccgttttttccttctgcagtgctggtgacttctgttccctgttcctgataattctcccagttgtttccctctttattacctgtagcatcatgccgcagataatatttgtcaccgtcggttaataaatccgcatttttcagatccatattttccccgactgtgactttgacatccttttcctctgccagattgaccagtggcggtgctttttttgcatctgccgcatctgcacggactcctgttaccccaaatgccgtcagcacaagcgccatgcatgacagtccgagtaatctggctttgctcccttcttttctggttttcatcctcattttcctccttttcttccacatgaaagtaaaaccagaaaatgctttatttttttctggttccttacatgtctgggattttcccgcttgaattctagagtactatactgttccctcctttagtatggaatatatttaccagaaattgtactttctttactatcacaatagatttcgctcatttattttgtctattttttacatattacgttttcacatcaaatttttacggtaatttttcaatcatttctgccaatatttcttcatcgaatcctgattttctgtccaacgtagatcatgttcggatctgcaattccatgctgccagttccagataagttgttgcaaaacgctttgcaatctctgataaagtatcattttcctgcacaacataatattccgcctgagcctcattttgactcaactgcctgtttacttccctttgaacagcatccggatcgtatcccatatcacacagcttctttcttcgttcttcaccgtttgcatattttccttgtatcacttccccggcaacttcctcaatacttttggacggctgccctgtcacgccctctgcatactttagtcttgcatagccacggatctgaccccatcccaccggaatttgccttctcgccactgcctcattataatttccttctatcactgtgatcatttgtcctgaaacagactccacgtatccaatgtgatcggaatatccgtcatttggctgtacctggcaatcccagttatacaaaatgatatctccgggcagtggcactatcgttccatcttcgatccagatccccttttctttaaagatttcgatatgcttttcacatccgcattctgttccgatcaagtccacacatcccgcctggatcgctgctgcagaaactgcggtatcacaccactcatcggtatactgcacagcatatccccttgccagaggcaggtgggaattatacagatcaataatctgtcggaacttcccattcgcttcactgtagccaatccacgaacgcatcacgttcaatacatcctgagcgcttcttcccgatgcattttcatcatacttcattaactgatactgctcgatcagttccatatttttctgcacatagacggaactggtcgcatacccatctgcccaaatggtttccagatatcgtccgggttctgtgattcccttcagattttgataacgtggaagctgaagcagttcaaaatatcctttcaccccctcttccatattgtcaaatatccggaaataatcggaaatcaccatcgccgttccggcctcatattcctcccaggttgccagattgacggacttcccctgccatttcgtcccacatttcaacccaaaataattgtgatagtctttcgccagcctggattctccccagccggactccaaaattgcctgtgcaataatcggactgcatactttgatttcatatgcagccgcatatttctttacatatcctgcaattttctgaataaattcctctttcttcatcgctctcccctgctttctgtatatttctctgcttttccattcaaaatatcaattgcctgtctgagtacttctggaatgggcatccccatcaatcccgcattttccagaatagacaacgcttcatttgcgataaacgcaatgcacacggcatccctcagataatttgtccccatcaaaaggtccagacggactgcgatcaaaacaaacaacagtgtcattccttttcggcacagccctttccagcccgcacgactctccagtctgccattttctgacttcggacttttcttaaaaatcaccggcagaagaatcccgcctgtgatccagtcgattcccataaaaagaaccaatgtctgcagtgcgatatcccatccgccaaataaaagggcaactgcactcccaaacattccaaacaagctcgtcaccatttgcttcatatccttcaccaccttcaattaaaaaagcagaatagacggcattcttttcaaagaatgttctactctgccactcatttttcttttccttttttcattcgatccgcactcaaggatgctcccttgtttctgcataatcgtctaacacatatcttgcatattttgttgcctgacgctccatcccgatcggggttaattccaatgcgttgatccactgaaaataatgtgtcagttcatgccctattgtaagcaagattgccgtcaatgcactgtcctttccccatttgtcacataaatctaaatagtctcctgccgcaacccggatatacggttccactgtataatcatcttccatactccagaatgtcccatataccagatccccgtccattgcccgtattttctttttattttttatgtaggcaacaactctgaggggaaagaaatattcttttctcaaaaatgccgcaaactctttacatgcccttcgtacctccggatctatcccactgtcaaaccgaagtctgaatcccgtccgatgaccctcttccatgaaatcaatgttttgttcccagttttctatcgtccaaatgtgatccataatgtttatcccttttcatcctttatcaaatacgatcttctcaataatcctggaacgtttaaagtaatagaccgttgcaacttttttctccatatagtgacttaattcttctcctgttgtcaccaaacgaaatgtttttggtttttcactgctttttggtttcaataaaattgttccagataaccaaatcatatttggaaattgataaaaaaccggctcacctataacactgttcaccttccgtcccctttcatcataaactgctttcatactatgatattgcatcttttctttttgcactccacataatctgtcaataaaaaataaacctatttttatggcaaagtatattacaaatgcaaagactataagcacttctttttttaagtattctaaatctattttaatcatgcacactaaaataattaagaatagaatcaagaacattacctgctttaataccacataacgatatgtatttgtgaatttcatatgtcttctccttacagccattcagatattttcccttttatcgtatcgataaagtgcacttacttgcttacccttatactctatctctgttgcattttgttcttcaaacatccacttaaatggtttcataaatccccctcttgccgatatacatcggaagtggcagtttcctctgtatatcgacagtttcttactgttttactctttattttatctcttgtatttttacaataatttctgtttcctcttcataataaacccgataccgctttcctttctctatctgttcttcacatagtttattccaggctggtccccatatctccaactttctcttatctccttccgctcccataaaagtatatcctcgatgccaggattcccaggctttcccttcatagatacaaatattctcattctgaattgcccgtgtatcttgtataactgtgtacaggcaggcaatcacaaccgctattcctaatagcatatcacctatgtttctcttgtttttattccagaatttactttgtactagcgtggtaattcccacaactccaagcactccaatgcatatcatttcctgatagattcctataaaatcatacatagatcttctcctattctatccccatcatttcttttcttccggtttctcatcaaatgcaattctttcaataattctggaacgcctgaaataataaaatgtcacgattttttggtcagcaaattttgccagttctttccctgaggccacaatttgaaatttcattgctttggcatttcgtatcggcttcaaaataattttcccatacacccagttacattcactatatttggtaacatctctggtagtttcttcacgccataatcctatttttttcatttctcgtatacgcattctatctttttctggtcctgtatacaaatcgattataaatagtacaacttttattcctttccagcctccccacataagtcccaacgatgagattcctatatctaacacagccatcgtatgcttctccgctatatacaaaatagataatccaaaagacatatcccatatcgaccaccatatcactgcgatacacgtcactaaatttaacaaaactgcaaaccaatatggatttttattcttcatattttctcattcccctgtatgttcaactttttacaacatcttcaccggttcatacaccatgctccgattcataccatacctttcgcaatactggtaaaattcttgtgaaacaatattgaaagaagatgtatgataccctcttttttgctctgtcaacacatctcctgttttatagacatgggtttgatctttcaaataatttttgtccagcaccaacttctgtaccggatttggaattcttatcattgcttttccacatttgggacaagatatgatcggcttgtttgtaattgcttccatcggcaatgtttccgcaaaatataactgatataaatcttttatctgcccttgggaagcatatttcttaaccggccagaattccaaacctttccagacacttcctaaaatccttcttgtcctgtccgaacaaaacaaaagttcatctgctgcattcggcccactgaaaaattgtcttgttccccaccttacaggcttcgtaacggataaatatccaatctgctcctcatgtcggtattacatttctttctgaaatggtcttttataaccgcaggagcgttgaaatgcatactcatcatattcccactgcactttcacgcttttgttccgaacaaacaaccattgcgcctcttcaatttctccttgggaatattcacaggttgtaatcgaatccagtcttgaaacaaatggaaactgttgcttaaatttttcatacactttctgatcttcatacaactcaaatagatactccttatcacttacttgaacagatgtccctagtacttcaaaagaatcttctgtctgataagggatttcatatcgattcagaaatctcaataaaccaaacttattttttaaacaataataatgcttaatcctcatattgcaccttttcgatttcaagatcaaaaatcaaatcgtcaaagtcatcatcccaatcaatatcgttgcagtaaaaccgaaacttatcctcgcccaattcttctttgatcatggcaaaaccatccacaaaacaagcaatcgtttctgttgtcggcctcaaacacccattactaattgcaatatttccttcttctaagatgacttctagttcaaattctttcggaacccaggtttcttcaaaaataatctgtggaaatctccttctttccttttttaaacgttttccattacagaatattttccctttgaatccatccaaatgtaaaataattgactgttcatattgcgaatttgtacttacaaaagtaaattttaatcgatacttcccctttttatcgtatcgataaagtgcacttattcgcttacccttatactctatctctgttgcattttgttcttcaaacatccacttaaatggtttcataaatccccctctcgtcgatatatatcggaagtggcattgtcctctgtatatcgacattttcttgttgttttactctctattttccttcgtcaaatacaatcttctcacccattacccattttgtgtgttttgcctaatcttcttttaatttttctaaaaattcctcccattcatcatctgcaaaaagatgataataatagtctgcttctttcaaaatgtaggactttccataatgtatcgctagcataatatgctcttcaaatgctttatcaaaatatggcctgagttcatcgggtgtatatagttcatagtctatcaacccagtcaacgttttgtcctctttagtcaaaacacctattctcctatatacatcggagtcatatgttgtcggatactttttcacatttgaaaaatctccgaagaaaaaatcatactctacataaaatgcctccgccattgatttttgcagatacatcccacacaaaagaccttttccctgtaaataccacatatttcttcgctttttaaaacctctttttgtgaactcctcatggcagaattctttaaattcttgttttgtcatatacactctcctataagtgagaaaaacacgtggaagggacgcgactttcctcttcacttgtttcctcagttagaggccaaaatgaaaccctcattttcaattttttaagcatttttaagtactttttgcttgccggtatttctgcacaataccagcaagcatcgtattgggatagctacaggcatcaaaaaacacttgtcaggagttcctgaaaccttttacttttttcttcggatacttttaagtaaaataattaataccacgaacaattctaaaatataaataccaaccaaataccaacaccgactaattattatacttgctaatgtacatactgtatgtaatatcccataagacacggtagccaacaaatccctactttcttttttgggatccgttatagcaataggtacaagcaaaaacattatgatgcttagaatcaaaaccaaatttgcaaactcataatttagtacatatttccaataaaaaaatacaattaaaaaatttatgcctagagtaccaaaccacactcctgttaatattgtatacaattttaaatttggaatagtctttttattcgcccaaaaatcatatttcttactcatatttttctcctacgcatcactttttgtaaaccatcttctgaaaaagttgctgacattagacacaatacctgccaagacagtttttcctgtactttttgtaatgttctgtttaattccagttactttcgctttatacattgcctgcttcctcaccgatttggttgcgttaatcacctgtttagagcgactatatactcctcgcatattttttccattcgctccagaaccacctatagctcctgcaactccgcctatcactgtagatgcaataaaatcttttttattcgattttacccctttatagctacaatttgccagataagttgttccacctaatgttgcattagccactacagcgccagcaaaccctattccagatgcagctatagcccctcctattgctgcggctgcataatccactagagataatgagctgatcacttctccgaatgaacttcctgtcgctaaaccaatacctacatctgcaacaaactgtgtagcaacacccactactgctccaactgccaaatgccatactgcaccgcttgaatctatcctcatcactgagttattgtcacaataagcatataagtttttatcatataaatcatcctgtacttctaaaatatctgtcgtatcaggactaataaaccttccaacctccggatcgtaataccgactattcagatagtacattcccagttcttcgtcatagtagtatcccttgaaacggaatggattccttctgcccagtccattcgaactgtaatccgtcagattcagcagttttccccaggaattatactcatattttacaagttccgttccgtgactgtcaagaattcccagaatatccccaaaaagatttttgcggtagaaatacatctcattctgatacttcatggcaaacacattacccttgtcatcgtagaagaaatcgatcctgctgccgtcactggacgtctgcatcagaatggccgaaccatccagataaaagtctgtcgtaacgccattgaccgtctttcggattctctttccgctgtcattgtacatgcagtacatatccagtccggcgcctgtgatgtgcttcagctgatgtcctttttcccattccatctgcatccccagatactggagcggatttcccatggcatcataagtaattgcctgtccattgtagaaatgaagctgatctctccagcctccggtctgatactcaaatgtatcggacttccacggtgcttctgtgatcactggattttcgatataacggtactcgtctcttctgaccatatttccacccacatcataggtgtaacagattgtcttattctgcttctgattatcttctcgtaccagctggttcagtgcatcatagtagtagcggatttttctttcgctgccatcggcgcttctctccaccattgtttccacatttccacaggcatcataggtgtaggattctgcacggtttccttcccggacagatgcaaccaggtttgtagtcactcctgcctctttgcctgagacgtatgtatactcctgagtcgatgtattcgtatcagagaagtgattgtgagtacggatcacacgtccaagggcatcatattcataggcaatcttctgggcgccgttgatcttgattccatatccaagtcctggtttctgctgtttctctacatccccgtaaaggaattccacctcatgtccgactcgatctttctgatacgtatatcctttgacacgatttttctcatcatacactttgcgaagtttcattccgtcagaacggtctgttcctaccattcttccgatcaggtcatactggtatgtgctaatcactccactgcaaagatctttgtgccttgcaatttttccacagctgtcatacgtattttcaaacagtttttcttctctgccgtctgcggtgatcagatactgtgccgcaagctgttcttccgaattgtattcatttcgaacggcttcccctgtcgcataggtaatcctgtccgcaagaccgttccggcttcgaagcgtggtgcgctccagttctcttcctccaaccgacacggattccagatttccaaacggatcatacgcataatcatacgtaaatccattgtgaccgatggacgtcactttttcgttttcataggtgtaagaaactttcacttcttttccatccaccattctcgcaacttctgtcatcttatccgtgttagcatcgtatgcataggaagtggcatttccttttgcatctgtcagctttgtcagaagacggttcttgtcatcatattcataatgcacggtatttcctctggaatctgtgatcgtcttcggctgcttataatcggatgtgtatgtcatagacgattccatgcgctcactgcactcttccaggatccaccatttgttgacctggctgtttgactggtgggctgtcagaatgatatctgccaatttttgatgggaataatccatcacatccagagacaggtttccatccttacagatgatcgcatatccatttcccggtgacacctcttcgaatcggaacagctgatttgcagctcccgacatagccgtctccaaagaaagaatagaaaagcctctgtcgttggttcctgattttgccagcacttttcccggtgcgtgaaccggctctaactgataatacgtgccgtcatatggcagcaaacgatactgctggttcatcccgccattgtagttgaactgcactgcctgtgttcctgctgctgtcgaagcattcttcacatcaatatattgtcccgaatgacgtacccggatatgataagtccctcccgctttcggaactgctgaaacagttccctcatctgccggttcaaaataccagtcctgatgttcgtttccttcttttcgtgtataactctgcaccggctgtccgcttgtggtactctttggtccatttgtcaatgctttcttatctttcgttgccttgctggtgatctggaaacttccatctgcgtttggatgcagcttccatttctgtgcatcggtattgttgtttccatagatctggatcttttctccttctgcatcagatttgttattaagatccaggcggtatccagagccacaaagaggctcaaactgcatatatccgtcttttccatcgatcagcttccatttctgcgcagcacttccattaaatgtataaagctgagctgttactgcattatttgcttccccgcctttcacatccagataatttccagaaactttttcccggatataatacactctgcccggtatgactgccccaagatgctttccgccatctgccgtcatccggatcggctgtcctttgtcattgtatgtgaatcgataacggactccttcggaattggcagcctgagtcagatgatttttcgtatcgtaccgatattcaaaccccgttccatcaacacttcccatcttggtcagacttccttttttgtcgtatgaaaaactctctttttccgctgcactcactgcattgatcagattcccgtcatcatcatactgatagctttccccatcatctctgacaagctgaactcctttaaacaagacctgattcacctgattgtaatacatcagatacacatggatcgccttgtatgttttcttcgccccttcattttgatcgtctgtactgaaggtgttgctgacaaactgccatcctttgatatttggattacactggaaatgatgccatttcacagaatcatccgtataaattaccgctgcggataaagaaaaatgtttctctggaattccaaagcccttgacccagcagctcaggttaaaaatgtctccttcttctccggtaatattaatcccctgcatcaaatggagattttgttccatctgtccgtttaataccgcacatctgcctttatctgcagtcatcacacttttgaccccggatgccgccggatggaattcccattgatccggcgcttcattcgtacaccgttcaaatcccggattgtggatcagattcagttcatttgccacatttcctgtttccagctgaacaccacttaccaaaagtgttcctcttgctcttgtcattcccacaaacacggaaatggtttcttctgccggaagctggaatgtgagaaccagtctctcccatccgtcatccacgtttttatctgtcacatagtcaatacagcgttcccccatgattctggtccggtctgcccggattacggatacaaccgctccctgttcctggttttccgggttcagcgattctgtttttacataagcagacaacgtatatgttccagctgacagatgcacatcctgacagattccttcttctgatgtcagctctgtttttgtcagtttcgcactttttgtaccaatatatccatctgcatgtgtgatcgctccccgttttccatctgacatacgacaggtgtaccatccgccatctccatgagacggatcaaatgttggatttctcagcagaccatacactgttttctgaacagaaccatctttactcagcttatgatttttcatgccggatgtatagtaagaataattatttgcaaatccatctgcatccagcacatctgtcggacgtcccatattgtcaaaatgccacgttgttttcttattatctcccggacgttccatctgaccatccaatccaggttcttcaaaaatcgtagtatttccgttttcataggaaatctttaattcctgacccggtgcatttttctgtcccgtttcggatactttgctgacacggggtacccggaaatcatttgtgtactcgtaatttacacgatagccatccggattggtcacactgagcagtttatgagaaccatcataagtaaactggctcttacttccatccggataagtaatggatgtcagattcccctgcgcatcatacccatatcggatctctcgccctttggtatcctgaatagctgttatctttgatttcccctcatccgttgaataaatgatatttaaaaatccacctgacgcatctgtaatatatcccagataatttcccgctgaattcggaccatactggtgtttcacggaatttccgtccagatcttcgatgaatcgtaaaaatccgtcctgtccgaatatatacttcactttgtcttttgtttccatcgtgcgataacggtcatgttcagaacttgacgtcactgtgatcgtcagtcccagcccatcctcatctttcagcttattaccgtcattggtatctttatagaaataatgttttgttccgtcttcatcgatatacacatacggataatctttgatcccactttctttcaactcctgctggctgctgagcctccatccgtaccccatacgggaagaggtatccgcttcactggaattatacacatgacggatttctgttgtcatcggacctccctctgttgccacatccagatgactccagacaacatttcctgtaaagtcattcgtgtaaccgattcctgcgcgccctgctgactgctcatggtaactctgataatcctccagaccatttacattcctgtaataaaacacaccgcttggaaactgttcagaagagatacttggtgagtcagatgcatagaatctcgcataagcacggtttgccagattttcatcatcttcatattttgatttcaccataattccatagttttttcctgtgttataccactgacgcaccaatctggtcacattgaatcctatcggtgtgatcgaaactgtatttccattgattacctgttttacttttttataatccagtattgcaccatctactgccggctgatttccccaacggacgcttttttcatcccagctgttttttacttcataagcaagaagcggcagctccggattgctgtaggatgaatattcaaactgccagatatacatggtcgctccgtaaatgatcgaaccttttccaatatccggaaggtctcgaaatcgaagcagcgctctcatttttccaagttcatcacttcgccctaccacgaaagatccatatgcatatacgttccccggattctccggtacatttcctcctgtgaaaacatacgtatcttcaatatttccttttgttttactcgtctctgtcattggatcgatcacgattggataaacacgttctgtgtcctgcatccattcacgatctggcacaactttgataacactgctctctgtgccgatttctacttgaaattccacctgaagagactgatttcctgcggcatcatacatatacggtttcaccagtctgaaaatccttcctgactcctgattttccgaatcatacagcccaagtcctccatcttcttcgcttcgcagctccattccaggatgcgtcagttgaaagctcaattcctgttctgccgcctcttttctgttcagtcgaatattctcttttagctgctctccctggattgagtaatgcagatcaattcccggaagaatttcctcatacacaccttctccgtttaaatgcggaacacacatcatctttcggatctcatcctcttctgactcttcctcttctaaaacagacactttcatatccaacatttctgcttctttccagaaatcttccttttccaaaacacgaaatgtagaaatttcaccttcataattcacgtttcgtgtactttttgtgtgtaaaaaaggtgacaatccccataagattttctttccgtctttctcgatcgttaccagttcctttgtatctgactcttttgcaaaacttacacgaactgcggacgcaagatttcgataaacttctctcccgtcttcctgtacagcttccagacggttatcaatttctttccactgtccgtcttcttcataatggaccggagccggatatacagctgccgccattcccttctgtgtcatctgaaaatgtttgacacaacgctctctcttttccggtacttcccgtaaaattctatctctcatatttacctcctgccgaaattctctgtattcggtctttctatttctttttacacgttttgtgcacgtttcgtgtagttatacaatacacgattcgtgttcttttgtcaagcacattttgtggattttttatttactttttcccacgttttgtgtataatcatattgtattcataaaaagttttgatttttacaaaaacttcccagcgcagcaaaaaagctgcttagaaaggacgtgtatgttatggctgtatttgccaatatactcaaaacactgcgaacagataaacacttatcccagcaggagcttgccactcgccttggcatctcaaagagtgcagtcagtatgtatgaacaaggacggcgtgaacctgattttgatattctgaataaaattgcagatatcttccaggtcgatgcagactatcttctcggacgtagttcactctctcacgaacccgaacctgtcacgattgccgcacaccttgatacctctgaccttacgcaggctgagttggatgatgttgaaaaatacattcaatttatccgttcaaaaagaaaacaataaaggagcattcagaaacggctatgctgaacaaatatgaagaactgttagaagaggctgccgcccagaacatatcagtagatgagaactttccttttcatggaaacttaaagggattgtatgtagatcaaaatatcgccctctcggaccaattggagacctctgcagaaaaagcctgtattctggcagaagaacttggtcatcactacacttctgttggaaatattctggatatctccgatcctgcaaatgcaaagcaggaacgccaggcacgaatgtggacctatgaacggctgatcggtctgcgtggtttgatcgatgcctatcagcacggatgccgggaatatcacgaaactgctgaatttctggatgtaacagaagagcagcttcgcgatgccattgccgattatcgctcaaaatatggagtctgtaccaaatatcagaactactatattatgtttgaaccctatctgatgataggaaagaaaaaatgaggacaacgccatcgtcgtcctcattttttcattctttctacaaaaaaattccatagacattactatctatggaacttaataactccccgagttgggttcgaaccaacgacccttcggttaacagccgaatgctctaccactgagctatcgaggaatactataaaattgtctcagctcttatcactgagtaaatggagaatacgagattcgaactcgtgacctcctgcttgcaaggcaggcgctctcccaactgagctaatcccccgttcaagctgttcagttatcaccgacagctattaaaatataccatattgcacagtacctgtcaatagattttttcaattttttgtaaaatatatattttatcttcaaaaccgacttttcaagatcgaaaatccctcttaaaatgacaacagcttcgtaatcaatatattgttatcatacaaaaatgtcagaatactgcttttctcaatcatctcaaagcaagactgtccaatcgcattattatacaataatgttatgatcaaaaacaagagccagacaatcaccagtgccgccgctgctccgacaaccgctccgcccaggtgattgaaaaatcccagaatcggaagctcgccgatcagatctactgcagccatcagtgccctgacaagaatccacacaaggataaatgtaacaagaaacgccacaaccttgaggatcatcctcgcaatatacgatgcagcatactcaggaaatgacttaactcccagttcctgataaattgtgctgttattgttttccagcagccggtttttcaaaaactccggcaacgctgcattttcaatctcctgaatctgcacttcttttggaatctctccaatgatattcaaaatatcctgaatgttgatccccaactggttccagtccagattgttgatatccgccagctgatcctgattcaattctccaagtgaagtaccgcttaaatctgcatttttcaatgtatctgcagaaatctgaggcatgaacatctccatacatttttcttcaatcatctcatccgcaggtgtccatttaataagcgcatcactgacataaggcgccagaaacataaccagcacgatcgacagaaccgtagccagcaacgaaattccgattttgagcagtcctctgacatagcctgccacgatactgatcaaaaatatcactcctacaataatcaataaccaattatccatattttctcctaatttgtcaggtaaacaagccgcagttcatcttcaccggcgatcaggtatctgtgaattccggcagccggaatcacttcctgtgcttctattccccagtctcccttaaatcgctgtattcctgtgtcgctgatgatacatccctttgttccgtcgaacatgatgatctcatctcctgctatctttacatgactatattctcctgttatttcccggtttattatctgttttcccgttttatcataaagctgcacttcatatcctgatttatctttattcgtaagaataaacccgatatacctgtccgagtgaaattcactgcgtatctcctgattcagcttcacttcggttttctttttcacggactttgtaccttcatagatcacaaatgatttatcaccaaccgcaacggatgtggacgcgtccatataaaacacatccggaacgactgtctgctcaaaatcttctgtataaatcaggttgtccgttttttcctgaccttcttttccaaaattataaaaagcaaccatggacttcaatgttccgttttttgtggaaagatacgataccatcaggttctccccatccgccgacatgtccagtgagattggatatccggtactgtttagatttacctgatgctctacgagtatatttcccactgcatcataggaaatgatctgcggcgtagattcgtttttcaggatcgcgcttacaatcccctgatttgaaacagaaatcttttcaatcggaagcgtagtctcaatctccccctttaatccactcttctgaaagatcatgatcgtattaccgcccacatctgctattgcaaacacatcctcattaacgtccactatcggattctgaatctgacagggctgaatccatttttccttattctttttattcagaaacacaacgccatctctgctgtatcggatcacaccgtccgaaaatgcgatatactggttgctgtcttctgtatctttcttatgtgagtccgctgttgcaacggacgtatacgtctgattttcaatcacaagataggttcctgtcacgatcatggctgccacgacgatccggatcgtccactgtcccagcacgcttcttctgtgccttttgacctgcctccgaatgatctccatatctatggatccagaaaatcgaaaccgcggatttttcttttgcttcatatccgaccccttatcattttgttttattttccgattatagcattattttatggtaatagcaatttctgacctacataaatcaaatttccatccgtaattccgttcatccgacagatagaatctacatgcgaaacatctccgtaggcctttttgctgatgatcgccagtgtatctccctgctccactacgtacactccctctgaggaatcaccttctccttctgtactctcctgttcctggacaatatcatctgctttttcttcttcctgttttatttccggatctgatgcatccttttctgatggtggtgtttcttcctgtttttttacgtctccctcattggatgcttctgtcacttcaccgctcaccggctgcacctcctctgtattattttcctgtaagaccgctgacgacgcctgactcatcactttctggacagctttcattttcccgaaattattgagtgtggtaactcccataataactgccaccagtataagtatggaacttgctacatacatcagacggttgttttttttctgatgcgtccggcttcctcgactgcggaccatgttccgaaagtcctgagcagctcgatcctcaacagtttccgagggagacaccccattctttcttcgagcagcaatcatatagttctgcatacatggatttttctcataatatgtataacgaccgccgatctccatcagatcattcagtttatgcacaaaataagattcttccttctctgcggaatccttcataacaaaaacagtattctgtttcgggaacgattttttatgaagtttcactatgttgctctttgcatccagttctactccgggctgtgcgacaaaccagcccaacatttctccgtcttcaaaatactgtttacagtcctcatatgcatttttccatgtttcatcatcgatcacgtattcattgccgaccagcttcaagtcgtgcatctgaatcgcaccatatatgtatacatattcctcatcctcgctcttttgcatatctcctacgagaaatgccccgatcggtccgtccttcgccttatcacaaagctgtaggaaaaaagtatctacatagtcctccacataaattttcgggctgtcactcacgtttccaatctgacgaacattttttgggatctgtctttccatgctgtatatcctccttgattcaattaattttttgccggaagcctgtccgctcccccgggttcttttagagaatagcacacgaaaaaggccgattttatcagttaatgtcacataagttcgacaaaatttttgcccgaaattcttctattttcttttcatactttcaaatgctccgcaatatttgtctgtcagtgtgatgatccatccttcttttgtgtgaggaatgctaaaaaatgtgactggccacatatgcgcccggatcacatctttctctatatcattcagaggaaataaacgacatgcatggtttaaggctgttttcggatgtgtcagcccgtggaaacgctgccccgtctcttttgcatgggtatgccagtcatacagaaacagatcatgcagcatcccgcctcttgccgctgattttgcatccagatgaaaaaagcggcaccacacataattgtagtaagatacatgaaggcaatgctgataacaattcgtatttccatgatgcggatatagtttcatacgaagcacaaccggatgcttcgcaatatcctgaatacattcataaaattcttcatcccacttctgtttcctcaacaggaactcttctttatgctttcttatataaatttcttccaaacgtcgaatcattcgataccataatttcaagtctttccacctccggattctcactgtacagacagctcctttccctattatagcacgcactttacctgcaaaaaatattttcggacatttttctgttttttgtagacgatacaaaaattgtatggtataaatatacaataagattccatttacagagtatatatctgtaactatcaaccaattaaagagagggggatttcctatggctttttgtaaaaactgtggcaatcagattgaggacaatgccgcaacctgtccaaactgcggagcttctcaaaacacgactccacaagccacggataacggtggctttctctggggattgttaggctgctgtatcccgattgtaggtcttgttttattccttgtatggaaagacaccaaaccaaagacatccaaggctgccggtatcggcgcattggtcggtgtaatcctgatgatcctgtattatatactgatcgcagtggttggtgtaggctttgccgctatgggattctaaggctcgatgagagtttggatttataagtggcttcctattatatttggctgtcattgcagaagtgaccgttccttttactggaaggggacacagtttccaatctgtgccaggtgtaccggagaactggtcggcatgattttatgtccgcttacctttccgcttgtttcctggtctccatggatctttgcaatactgatgctgccgatgatcctggatggggtgattcagatggtcacttcttacgaaagcacaaatataagaaggttccttacaggattcctgtttggatatgcattgatgagactgtttcttgtctctacgatatggacattccactttggctacaatctagtgccaaagtaaaaatcccctgacggagaacaatttgtttctgccggcaggggatttctcttttctgaattttatacaaacgctttgatcttctgatagatactttctgtatccagtccgtattttgcaatcagctccaaagccggtccggactcaccgtacgtatcattgattccgatcttcatcacctgtgtcggtgctttttctgaaaggacatcacatactgcacttccaagtcctccgattacggagtgctcttccactgtaacaacttttcctgttgcctttgcagcttccacgatcagttcttcatccagaggtttgatcgtatggatgttgatcactttcgcatcgattccgtctgctgcaagcttctctgcaacttccagacagttggaaaccggaagtcctgttgccacgatagtcagatcttttccttcgcgcagcacaacaccttttccgagttcgaacttgtaatcttctctgtcattgattaccggaaccgccagacgtccaaaacgcatataaacaggtcctacatgctcgtaagccgcttttactgctgctcttgcttctacatcatcagaagggttgatcacaaccattcccggaattgttcgcatcagagcgatatcttcgttacactggtgtgtcgcaccgtcttctcctacagagattcctgcatgtgtcgcaccgatcttcacgttcagtttcgggtatccaatggagtttctgatttgctcaaatgcgcggcctgccgcaaacattgcgaaagagcttgcaaatggtacctttccggctgctgcaagacctgctgccacacccatcatattactctctgcgataccacagtcgataaatctctccggatgtgcttttttaaacacacctgtctttgtagctgccgcaaggtctgcatccagtacaactacattctcatgtgcagttccgagttcggctaaagcatttccgtaactgtctcttgttgctattttctttacatctgacataatgcttcacctactttctccaaatctgccattgctactgcgtattcttcatcattcggcgcttttccgtgccatcctgcctgattttccatgaatgaaacatcttttcctttgatcgtcttggcaatgatcgctgtcgggcaccctttcactgtctttgcctctttgaatgctgcatcaatctgatcaaaatcatttccgtcgatgttgatcacatggaaattgaatgcttcaaatttcttatcaatcggatatggggagttgacttcatcaatcgcaccgtcaatctgcagattgttgttatctacgatcacaaccagattatccagttttttgtgcgctgccagcatcgctgcttcccatacctgtccttcctgaatctctccgtctccaagaagtgtataaactctgtaatctgcgttgtccagttttcctgcaatcgccataccaactgccgcagaaattccctgtcccagagatccggaagacatatccacacctggaatgtgcttcatatccggatgtccctgcagataagatcctgtatgacgcagtgtctttaaatcttcaaccgggaaatatcctctctgcgccagtacagaatacagtcccggagctgtgtgtcctttagacaggacaaatctgtcacggtctgcttttttcggctcttttggatcaatattcatctcttcaaaatagagatacgtaaaaatgtcagctgctgataaagatccgcccggatgtcccgcttttgcgctgtgtaccgctgtgacaatccctttgcggacttcatttgcagttttcatcaattctaatttgttcatgattgcctcctgcttttactctccgaaaacagctttataatcagcctggaatttctcaattccggcgtctgtcaacggatgatgtgtcatctgttcgattaccttgtaaggcactgttgcaatatcagcccctgcaagtgcacagtctgtaatgtggatcggatttcttacgcttgcggcaatgatctctgtatcaattcctgcaacttcaaagatctgagcgatctctgcaaccagatctgttcctcttaccgagatatcatccagtcttcccaaaaacggtgatacatacgttgcacccgctcttgctgccagaagtgcctgatttgcagaaaagatcaaagtcacatttgtcttgattccctcagatgaaaggactttacaagctttcaggccttccactgtcattggaatcttcactaccatgttcggatgaatctttgcaatctcacgtccttctttgatcatgccttctgcgtctactgttgtcgctttgacttctccgctgattggtccgtctacgatggatgcaatctctgcgattacttcttcaaatacacgtccttctttggcgatcagggatggatttgttgtaactccacagatcacacccatgtcatttgcttttttaatatcctctacatttgctgtgtcaataaaaaatttcattgcctgtccctccttaaaatcttcgtcgatttgttataattcgattatatagactccctggaaacaggtcaataggcccaaaaattattagtaattttgccgtactaataatatcacattattaatgaaaaaactactgctaactttggttttgccttttactgttaatttttattactaataatttacttttttgtactaatttttctttttttcagatttggatatccggttgttccccgcatcacgatctgtggctcatactccacatgatagatgctcaccggctcgatcccggcatacggctcactgcgggctttgatctttttcatgatgatatcgcaggcgtctctgcctttatagatcacgaaatgttcgactgttgtcagcgcaatatgatgcattctcgcaaacaatgtgttgtcgcatcccatcacggacatctctcccggaactttgtatttctcctcgtacagagcatctaaaataccaaaggcgatcatgtcattgagccccacgatcgcagtcagatccgtatgctctttcagcaattcctttgtcaggtcatatccgatccgatattccgaatcgattcccggcacatctttatcaatctgctcatccgcggctttgatcaccacatgatctccaagtcctgctttctgaaactccttcaaaaatccttctacccgcttggaacgctgcttctgccttacagtcagcggcggcgcaatatatgccacatgggtatgtccgagttccagcagatgctttgccataattctgccaagctttgaattatccagctctaccgcatccacattcagccgttcattctgattgttgatgacagcaaagggaatcttgttggacaactgctccactgtctccataaagcagctgctcggattacaggtgtagatgaccccctgcggattcagagagggaagcatctttaaataacgctcctccaactccagatctctctgggtattacacacaaacagcccgaacccctgctccgttgctcttgcttcgattccctgcaaaagcatgacataatacggattggtcagattcgggcagaaaaccaccagaagcttttccctgcggctttctttctgtgttctgcgcttgggaagcacataccccagctcccgggctgcatcctccactttttttaccacttctttggaaaaagaaacattgtacttcttatttaaaatcatagaaaccgtcgtctgggaaacgccggcatatttcgccacatccgaagatgtcactttctttttgttcatgatttctcttccctgtcctgttaaagctccgttctgccttccagtgcacgcagaagcgtcacttcatcaatatattccagatctccgcctacaggaacaccgctggcaatcctgctcactttgatcccggtcggcttgatcagcttgctgatgtacattgcggtagtctccccctccaggcttgagttggtcgccacgatcacttcatctacatcctgctgcagtcgttccatcagttcttttaagcggatatcccccggtccgatccccagcatcggagagatcgctccatgaagcacatgatacactccgttatattttccggtcttttcatatgctgccagatctcttggagtctccactaccatgatggtccgctgatcccgttccggattgctgcagatcgggcaaagttcccggtccgtcagagtacagcactgtgcacagtatctcacattatttctggcatccacgatcgactttgccagattctccacctgatctttcggcatattgataatatgaaatgccagtctctgggcagacttcgctccgattcccggaaggcgtgaaaattcttcgatcagcctgctgatctgattactgtaataatccattctttttcacctctgtccggattagaacatacccggtattcctccgccgagtcctcctgtcagtttggacattgcagagctggattcttcatccactttgcgaagcgcttcatttgttgctgccacgatcagatcctccagcatttcaatatcatccggatccacaacctcttctgccagcttcacctttagaacttctcttttaccggaaacggtcacttccaccgcttctcctcctgcagtcgcagtaaattcctttgcttccagctcttttgcctgttcttccatctgacgctgcattttctgtgcctgtttcatcagatttgccatgtttcccggcattcctccgccaggaaatccacctctttttgccataaatcagtcctccactataatctccatattgatcttcttctcaatatctacaaatgtatcctcaaaccggcgtccttcttctacgtggcgtacttctacttccaccttcttgccgatcctgttttcaatcagactttccagttccttccgtctatcttctctgccaacaaaatctgcccccagtgcatccggcatcacgatcatcagacggttgtcacctgcaaggcttagacgcgcttttttcaggtatgtccgaagcattcccgatgcctcatctgcgatcggtctgaaattctttactacctgctgcacatcttccggtactgcgtttggaagttccggtctcggcgttggctccgccggtgcctgaccatcttcctttacataaacaactcgttcctgaccacctgatataacgccctgttccagcttttcttccaatacacggatccgatccagaatagaatctgagctcgtctccatggcaggcgtacaaagcttgatcagagccacttccagaagcactcttttttgcgctgcatatttcagctgacctgacaattccgaaaaaatccgaatgtaacggagcaacatatccgcttccaccatcccggcctcttcctgaagctgctgcatattttctgtagatacatccagaacatcctctatattatcagatgtcttcacaagaagcaagtttcgcagataccatgtaaaatccgtggcaagctgcgtaagctcccgcccctgcatcaccagatcatcgacgatatcaagcacttttgggacatctcgtctgatcacactgcgcagaagtctgctgaacacatccgtatcgactgctcccagtacttccagcacattgtcatacgtcagcttctgccccagataaaaggcaatacactgatccagaagactcaatgcgtcacgcatcgaaccatctgccgcctttgcgacatagcgcagcgctttttcttctacttccacctgctcttcctgcatcagatcacgcatccggtctgtgatcgtctcaatactgatccgcttgaaatcataatgctgacaccgggataaaatcgtgatgggaatcttgtgaacctcggttgtcgccagaataaagatcacatactccggcggttcctccagtgtctttaacagcgcattgaacgcccctatcgacagcatatgcacctcatcaatgatatagactttgtactttccttctgtcgggcggtatgccacttcttcccggatctcacggatgttgtccacaccattgttcgaagctgcatcgatctcgatcacattcatcgatgtacccgctgcaatagagcggcacatcgcgcactccccgcagggacttccattcaccggatgctcacagttgactgcctttgcaaaaatcttcgcaaccgttgtcttaccggtccctcttgttccgcagaacagataggcatgtccgatcctgtttgcttcaatctgattttttaatgtagtaataatatgttcctgacccttgacatcttcaaattcaacgggacggaactttcggtaaagtgccgtatacgacatgtattacacctctgttttccaaatcttttattgatctccaaagctgatgccgatggttcttgcctctttgatgattccatcctgcggatctaccattttcagctttcctgccacatcctgaagcggtacttttgtaatcttctgattcttcatggcgatcatgtagccgtattcctgattcagaatcagctctgccgcagccgctcccactcttgtggcaaatacacggtcatacgcacatggagaaccgcctctttgcgtatgccccggcaccgtaatccttacttccttgtctgtcttctgctggatcttctctgccagttcgtaggcgatggacggatatttccgttttgcaagcttttctttatattcttttttcttcagcctggcatcttcttttgagattgcaccttctgcaaccgcaatgatcgtaaacttcttatctgctgccgcacgcctctggatcacatccgtcaccacatcgatatcatacggaatctccggaagcagaatcacatctgcaccgccggcaattcccgcatgcagcgtgacatgtcccaccttatgtcccattacttcaatgataaacacacggctgtgagaggttgccgttgtatggatccggtcgatcgtgtctgtcgcaatatccactgcactctggaagccaaatgtcatatccgtgccccacagatcattgtcgattgtttttggcagtgtcacaacatttaagccttcttctcttaacagattcgctgtcttgtgtgttccgtttcctcccaggatcaccagacagtcaagacttaacttatgataagtatgcttcattgccgccactttatccaaaccgtccttgtccggtacacgcatcagcttaaacggctgtctggatgtaccaagaatcgtgcctcctcttgtcaggattccggagaaatcctttgatgtgagcatatgaaagttgccatagatcagacctttgtatccgtcttcaaatccatagatttccacatcatcccgttttgtgcaaacaccttttacaacaccgcgcattgcagcattcaaagcctgacagtccccgccacttgtaagcattccgattcgtaacatatccgtatcctcctactctttgattttatcaattccgcaccagaaatcggtgctaaaagactttatttcctgttttatcttatcacaaacaggcgaaaatgaacagttttatattctccctcaatttttctcaaactttccgattggtaattttctttccattgtgttaaaatagacacatcgtaaaacaaaacagatttgaaggagataactaaacatggaaagaaatgatccttgctggtgcggcagcggcaaaaaatataaaaaatgccatatgccgatcgaagaaaaaataaaactgcacagagacagaggggaaattgtaccttccagaaagcttttgaagactccggcgcagatcgaaaagatcaaaaaaagtgcggctctcaacacggctgttctggatgaagttgccgcacacattcgcgcaggcatgagtactgctgagattgacaagattgtatatgattttacaactgcacacggtggaatcccggctcctctgaattatcagggcttcccgaaaagtgtatgcacctctatcaataatgaagtgtgccacggaatcccggatgaaaacatcatcctgcaggagggtgatatcatcaacgtcgatgtatctaccattctggacggctatttctctgatgcatcccgtatgttcatgatcggcgaagtatccgaccgcgccaaacgtctggtgcgtgttacagaagaatgtgtagagcttggtcttgcagcggcaaaaccatggggacatctgggagatattgcagatgcgatcaatacccacgcacaggcaaacggctactctgttgttgttgatatcggcggtcacggaatcggactggaattccacgaagatccgtttgtcagctatgtcacaccgaagggcagcgagatgctgctcgtacccggaatgatgtttaccattgagccgatgatcaacgaaggcagcccggacttcttcgtagatgaggacaatgactggacgatctacaccattgatgacggactgtctgcacagatcgaatatatggttctcgtaaaagaagacggaattgaaattcttacaaaatagtcaaaaagctgcgtacacaggacctctcctgctgcacacagcttttttatttacttcatcagcatatgcagatatttttcatactcgactccgtcattgcgcggaatctcttctttcactgcatctgtaatcgctttctcgataaagcttcctgcaagttccatcatggacttcagattttctcctcttgccagtccgcctgccagcacggaagcaaacagatcacctgttccggagtagcttccacctacatacgggaatgctgcaagatgtgtctcttttcccgtcactgccagatttcccatcttctggatcccgtcttcattgtcacaaaactgaatccctgtcactacaacagttcttggtccatctttcctcaggttttccgccagctgcctgatcaccgtaagaagatgtttttcgtccgtcatattttcgatcatccgataatctgtatccgtcagaatacaaagctccgtcagatttggggtcacaatatccgccatcttcgcaagctcccgcatctttctgcaaaactctatggagaagatatcaaatttgtatccatgatcccccatgatcggatctaccagcagaaaggctttcttcttatgaaatgtctccgcaatatggatcatatgaccgatctgctcttcatctgctgcaaatcctgtatagataccgtcaaaccgtgcctccatcttttcccaggatcgccgaaactgctccatttcttccgtaaggctcacgcaatgatagtcttcatatcctgtctgtgcactcagcacagctgtcgggagcggacacgcctgcacgcccatcgctgaaagcactgaaattgctgccgtgagagaacatctcccaaatcctgagagatcgttaattactgctactttctttcccatactcatccacctgcatttctctgactggcttcatgatcagaacagaatgttttcccatattgacaacagtctctccatcctccaccagataaatgtctctttctgtcgtatagctcttttcccaggagtacatcagacgctccatctttcctttcataggcacctccgcctgccacaccgggattgtcacttcctttagttccttactgttatttaacacaacaatgatctgttcaccttcctgaaatcttgcataagcaagaacattggatgaccaggaaagcatcttcagagaacctgtacgcagaggcttctcacgcttgtggatccggatcatttctttatggaactctacaagttctctgttttcctgtccccatggataggtcctgcggctgtccggatcggtaaatccacagacacctgcttcatctccgtaataaaccgtaggtgctcctacccaggtcatctgaactgccactgcctcccgcatcactgccagattgatcccttcttctgccgctttgcttccaagctgtgccactcttcctacaatgtgattcgttctggtcaggaaccgggaatgatcgtggttagacagttcattcatcgccacctgtaatgacggggtcagcatgcttgccataaaatgattcatcgtattgacaaagttgtctgcattcccccacaagtctgtcctgcgctcatcactgtgcttttccattcctgtcaagaaccaggtcagcggctccataaaggcatcataattcatcacgctgtcccattcatcgccctgaagccattctcccggatctccatagtgctccgccaatatcagcgcctgcggattggcactttttacagcttttctgaaattctcccagaagatgtgattgtattcattgctgtatcccagatctgccgccacatccagacgccatccatcggcattatacggcggcgatacccatttctttccgatgtttaaaatatattcctccagcgtgggagaatcttcatagttcagcttcggcagcgtatcatgtccccaccatccgtcatagtttttattataaggccacgcttcttctctttcatcaaaaaaatgaaagaaatctctgtacgggctctgcgcactgacataagcacctttttcgtattccggctgcggttcataaatccgttcccggtccatccacttattgaaagagccacagtgattgaacactccgtcaaggatcacccgcatgccccttgtgtgcatctcctccaccagttttgcaaacaggcggttgcttgcctccagattccgaatgtcccctgtccgcttctgatattttgtcgctctggtattgtccttttctccctctggaagaacctctcctccgtcttctataatcacgccgtaatgcggatcgatgtagtcataatcctgaatatcatacttgtgattcgacggggaaacaaacagtggattgaaatagatgacttcaactccaagctcttccagatagtccagtttatccaaaactccctgcagatctcctccatgaaatctgcggatatccattgccgccggaaattcattccagtctttcactttacagaccggctctccgatataaacgtattctccatcctccacatcattggatgggtctccattacagaagcggtctacaaaaatttgatacatcactgcgccttttgcccatgccggtgtggaaaatccaggcatgatccggaaattgtaatattccaccggatgttccgatacgccacatcgatgatagcagagctcttcactctcgctttttatccgaaaataataaacaaacatcgtatctgtaagctgcacttttgtttcataataatcaaacacttccccggaggatatcttctgcatctgcagtgcttctcctcctgaaatcagacagacctcctgagcgtcatctcttgccgttctgaatctcagcctgactttttcatggatacccggttccgcaggtatgacataatccgatgtcccatcacagaacagcgcatttttattcatataaacctcctttggggcaagccccttaaaatgcctgcccggcattaaaaacagcttgccccattctacacctacttctcaaaaagtgcttcaaactcacttcttgtaatcttttctttttccagcaataactgggcacaggcttccagtacagactgatgctcctccagaattgcttttgctttcagatagcactcatcaatgatacgtttgacttcctcatcgattgttcccgccactttttcaccgtatcctctggatgtgtgaccaaaatcacgtccgataaagacttcatcactgtcattgtcatagttgatcagaccaagacgttctgacataccgaatttggtgatcatggattttgcgatcgcagttgcctgacggatatcctgagatgcaccggttgtaatatcatcaaagatctgttcttccgctacacgtccgccgagagacactgtaatctcctgaagcatatgtccttttgtattgaacatatcatcgccttccggaagcggcatcgtataaccgcctgctcctcctgtcggaacaatggacacactgtagacaggtcccacatccggcagtacatggaagaggatcgcatgtcccgcctcgtgatatgctgtaatccggcgttctttttcagaaaccacacggctctttttctccggtccgatcccgactttgacaaacgcatgccggatatcggactgctgaatatacactctgttttcctttgcagccagaatcgccgcctcattcagaaggttttccagatctgctcctgtaaatccactggttgtctgcgcaatctgtttcagatctacatcgtctcccagcggcttgtttctcgcatgtactttcagaatctcttctcttcctttgacatccggacgtccaactaccacatttctgtcaaaacgtcccggacgtaagatggcaggatccaaaatatctttccggttggtcgctgccatcacaataataccttcattaacaccaaaaccatccatctctaccagcatctggttcaatgtctgttctctctcgtcatgaccgccgccaagtccgcttcctctgcgtctggcaactgcatcgatctcatcgatgaaaatgatacatggggcattcttcttcgcatcctggaacagatccctgacacgggacgctcccacaccgacaaacatctctacgaagtcagatcccgaaatcgtaaaaaacggaaccccggcctctccggcaactgcttttgcaagaagggtcttaccggttcccggaggcccctccagaagcactccttttgggattcttgctcccacctgaacatattttttcggagatttcaggaaatcgacaatctctgcaagctcttctttttcttcctgcagccccgcaacatctgcaaatgtcactttcttatcattctcagaactcatacgggcacgactttttccaaaattcattgcttttgcattggcaccgccactctgtctgttcatcatcatcgtaataaacatgaatccgacaagcatcagcacaaccgggagaaccgtcgtactcagcaccgaatcctgagggatcgcgcttatgcggtattccacatcatttttatccagcagcttctgcgtctcattgacatccgatacgttgacacgtcccgtttccctgctgtcgcgcaatgtcagtgtgaccactccggtaggcactgccttattctggttgatcaccacctctgtcacgttgtcatcctttatctcctgttcaaactgagtaaaagttatctcctgcccgcgcatctgtacacggctcgtcatccatagcacaaaaaagatcacagcaataaacacaaccacggttgcgccgcttatgcctttatacttcttgtcattcaatgatactgctccttcctattccacaccttctacgactccgatatatggaagatttctatatttctgtgcgtagtccagtccatatccgactacaaattcgtccggtatctcaaatccgacataatctacttttacatctctttctcttctctccggtttgtccaaaagagtacaaagctgaatgctctttggatttcttttcttcagaacatcgatcagataatacagtgtacgtccggaatcaatgatgtcttccacgatcagaacatcttttccctcgatggattcatccagatcctttgcaattctgacaacaccgctggatgttgtcgcatccccgtagctgcttacacacataaagtccagagaaaccggcacactgattcttttagccagttcacacatgaaaaatactccgcctttgagtacacagatcatatggatctgctttcctgcataattttcgctgatctgttttcccaatgttttgattctttcatttacttcttcttctgaaactaacactttaattgtctctgccatgttttttatcctccattattttgatctctattatcctttttgtatgttcagatatctgatatctgctgctcatccgatatccgacaacccacagtatctgatgcccctcggcgatcagcaaaatccgttctctgctttttgcaggaatcttctcattgataaaataagatttgagcttctgcgtaccgccctgtctgttgacacccaaaacatcctccggctgtctcgttcttacggtgagactattttttattatatcatagtcaaaccatttcgtgtagggggtttgcggtatctgttctatcgaaaaattcttatctttttcccaaattgtacagcatattcgcagattcctgtcttttaatcgggtaattccgggaattataagttcttcccggcactctgtctgtctttccgctgtctgttttatcaaaagtattccttcataattcctctctgcacagatattgtagggaagatttcgctttcttccgctctgcttttcaaacaactccgccactgccgcaacgtgtacagacacaagatcctttcctgttcccgccagattttccagacacttctgaataatcccgttttggatgaccggatcacactgcatccattcatcccacagaagcaaaagcccctcttcctcctgccttaccacacatctgcaatgcgcttcgatttcccgctccagataatctctgatctgatttaactgctccatcgtttcattcatgtgacggacggcctgcctgttgacctgctcctccagcataggaaggatctgatgccggatcctgtttctggtatattcatccccggcattggtctcatcttcacagtaggaaagctgatgttctttcagataatactcaatttccttcctgtttattccaagaagcggacggatcatatatccattgaccggccggatcccggaaagcccccggattccggttcctcttgccagattcaaaagcatcgtctctgcattatcgttctgatgatgcgcaagcgcgatcttggtccccccataacgggcccgcacctcctcaaacgccgttcttcgcaccagacgccctgcctcctccacagacagctttttctgtgcagcgatttcttttacattctcatgatacacaatacatggaacattccgctccctgcaaaatgtttccgtaaaccgttcatctctttttgcattttctccacgaagcccgtgattcacatgcactgcgatcacatcaaatccgattttttcctgcagtctcaaaagtacaaaaagcaggcatatcgaatccgcgccgcccgatatccctgcgattactttatcttctttttgcagcatatgatatttttgaataaaatttaaaactttcttttccatactgtaaactataccgaatccgtccccaaaatgcaagtatcctgacaattccagatccctactgccagtactgtcatatcatccatcggttcttctccggtccagtttaatacctgctccagaatgtgatgcgcaagctctttgggatttccgcctgtcgttccaccaatgatcgtttccatcagaaggtcctgttccccaaccgggagagcatccagcacaccgtccgttatcataacaacaaaatctccgtcttccagcgttctctgcacagattcgatttcaatggagtgcatgaccccgatcggcagactggacgaactgatacgctccactttgtttccttttttgataaatgtggaagaagctcctgctttgatcagacgacattctcctgtatacagatcaaacatgctcagatccaccgtggaaaaatggatttcctcacgccccatcaccaatgtcgtattgatcatctgaatcgccgcctttgccggaaatccggcttccaacagctcttccagcaattccatgacaagcgtactctcccggcatgccttctctccggatcccattccatcggaaagcgccactgccagttttcctccgccaagctcacgcatcatgaaattatcacctgagatcttgttgcagtccttcccaatccttgccacaccgtaaagtgtataaaacaccggaccttccatgcacacaatcgtctgatattctttccccagcataaacgcctgatcactctctgcaataaactgcctccccatcacttccgagacagcctttacaagcgctttgatcgtaacgcaggtatttttcaccgctcttgcggtaagatgtacttcatattttccttctctgttcaggaaaaaactgctgtacagtacacgaatccctctcttttttaaatgagatgccagctttttttccagacgctcgtccgaaaataaacttttttccagctctttcgccgtactgcggagcatatccgcaaacgtatccatctgaaccgcgcacccttccctgccaagtacgatccggttattccacatcatattctgtcttgcatcgtgaaatgcacccagcatctcctgtaaaaacgcttcccaccgcagacacctctgctgaagcttcctttttgtttctgtattcagttcactcccgtaatgatcgatggcagataaaacttcatatcccatctgataggtatgtacaaaatcctcttcccagcaccaggaacatttttcacagcttttgcaggctctttcttttgtccggtcaaacatatcctcaatctcctcattggaaaatgcggatttcttttcctccagatgaagaaatgtccgggaaagctgtttgatagaatctgcgtatttttcaatctgtgtcacataggggctggtgtgcagtgcctgtccatttttcatggcgatgtcctcctagttcttatgtatgtaatattagaacatgcaaaaagccccaggaatttcccggagcttctctttcgtatcgtcactattttgccggcttgaaaatgatctcattcggatccaccagccctaatttttcttctgcaatctctttcacgtaatcgtctgtcttcacatacgcttcgtatgcttccacttcctttgcacgctttttctcttctttaatctgtgcttccagttctgcttcctgcttcttgtactgtgcgtttctgctgcgcagagatactgcattcactgcaagtacgcctaccagcaatacaagaatcatactgatcagcatcatactttttttatgataccgccatgcagaattcgtcttccggctttttgatctgccagcgactttctttttctgaatcgccatgatactcaccctatcaaatctaacttctatttccatcctgcctgcaaataaatttgcctgacacaagtattctatctgcttttttctcttttttcaagttattcagccgttttaatcaagatttccttgttttttatgtttttttcaatttcctgaaaattcgtttcaacaaatgctgcacccccacagcagtcagcagcccggctgcgattcccagaacaaagaaccagcgaatacttccataagtcgtacaatacatctgacgaaacacatacgcactcaccaacagccaaaagccgatatcctccacaccgactgccagcggatgatgccgcacgagtcttcgtatcagcagcagaatctgataaccgcaaaaaagtaccatccccgtaagcgccgcatagaaaaaaatcacaacttctgtttcaattccgagcatcataataacgcctacttaaataattttgacagaaagctctcattttgcccgccctgattcactccagaataagcaatactgtcaatatttccggaaaggtctacttctcccttctcaacactgagccggttcacatggaggtcagtgcctttcaccataagcatcccctgctctgtctccagaagaatctcattcagatcaaacgagagaacatccagaactccggtaaccatacttgtctttctgttattcacgatcagtttatgtgccttcgccggcatttgtcgttcttccatacactttcccctttccttctgcttttctatatatatgaggggttgtattattttataccggaaaaacgaatttttctgttttataaatagcggaacaggtctttcgcctcttctttcttggtcgtatcctgaatatccagcacttctactttcaccgtctttgtaccgaactgaatctcgatcacatctcccactttcacttttacggatgcctttgcaggctttccgttcaccagaactctccctgcatcacatgcttcgttggctacggttctgcgtttgatcagcctggaaacttttaaaaatttgtccaatctcatcaatcttttctccttccttctcctgtaactgaaaagagaatacaaccggcttgtccgactgtatcctcttatgcatctttatctgttcgtcaattatgcgtttacagcatctttcagagcttttccagctttgaatttcggagctttgcaagctgcgatcttcattgtctttcctgtctgaggatttcttccttctcttgctgctctttcgcttacttcaaaagtaccgaatcctactaactgtactttttctccttcttttaactgctctgttactacatcaacaaaagcttttaatgctttctctgcatctttctttgaaatttctgcctgctcagcgattgctgcgatcaattctgttttgttcatggataattcctcctctttattatgctagaatgattattctaaattggtaaaggccgcatgtctctaccctttacatgtcgatacccttatgtactgttataactggtgaaactgcttttgtcaagcagtttcacagatttaccatgcaaagcggtactgtttacaataacagcaacatttttacataatcttatcaatcattgccagcacttctttgcccatagctgcggatttttcatctgcatcagaaagggaggttcctttgataccgtagtagaatttgactttcggctctgttcccgatggtctcacacataaccatgcatcatcggaaagatcatagtacaatacgttcgatgttggaagacctgtcgaagatacttcaccagtctgcatatcctgaatcgtgtctgctttgtagtctctcgctttcagcactttgtagcctgcgatctctgtcggcggattcttacggagtgtctcaagaatctcctggatctttgcaagtccttcgattcctttgagtgtgatagactggatatcatctttgtagtatccgtatctctcatacatctcgatcatggcatcccagagagtcatgtcttttgtcttgtagtaagcagctgcctcgcagagtgccattgtcgcaacgatcgcatctttatcccttgcatgtgttccgatcagacatccatagctttcttcaaatccgaataagtactcgccttttttgcttgtctcaaatcccagaatctgctgtccgatatatttgaatccggtcagaacttcaatcagccctgtgttatagtaatctgcaatcgcatccgccatattggttgtcacgatcgtcttgatcagatatccatcctcagggagtcctctcaatgcgtttctctgtccgatctcatagtctgcaaggagacagccggacatatttcctgtcagatcgtgatattcaccgtttttatcttttacccggacacccagacggtctgcatccggatctgtagcaagcacaatgtctgcatccacttctcttgccagcttaagtcccagttcaaatgcctctgccgcctccggattcggataagaaacagtcgggaattcgccgtccggcagttcctgctctttaactacgtatacgttctcaaaaccgagctcttttaaaattctgcgggcaggaatatttcccgttccatgaagcggactgtatacgatcttcagatcttttccaactgcatcaattgcatcctgatgaatcacctgttttttcagttctgctatgtaagcatcatccacctctgctccgatcacttcgtagagtccggctgctttggcatcctctgccggcatcgtcttcatcgtcgtataatctgtcactgccttgacttcatccatgattcctttgtcatgaggcggtgtgatctgcgcgccatcttcccagtataccttataaccattgtactccggtggattatggctggctgtaatgttgattccggcaatacatccaagttttctgactgcgtaagaaagctccggtgtcggacgaagggaatcaaatacataggctttgattccgttcgcagccaggcagcatgccgcttcctgtgcaaattccggtgacatccggcgtgagtcaaatgcgatagcaactcctttttctgcgtttccactctttaaaatatagtttgccagtccctgtgtcgcctttctcactgtataaatattcatacggttcgttccggctccgataattccccgaagtcctgctgtaccaaactctaaatctgtataaaaacgctctttgatctcgttctcatctgatgcgatacgctccagttctgcttttgtatctgcatcaaaataagcatttgtcaaccactcattgtatatttctttgtaacccatcttaggcacctcctgcaatatagtatggttctattatacaacagccgcctataaatgaaaagtgaatatattctctaaaaatcgctctttttctgcctgttgtccgattgcagtctgcagtttttctacacttttctccggaatccgcgccttattggaattcgaatacaaatttgctgtcttccagaacttctccggataggccaggcaaagtgcaaggaattccttttccctgtcctccagaggacgaacgctctcatacatctccagaatctttcttcccagactttctttccactgatatttttccatcacctttcgcaggaaataatacagatcctgtacctgtacatccattctgaaatgctcaaaattggtgactgcaatcctgccggaactgatccagatgttgtgataattataatctccgtgtatcagctttccggcttttaaattgtctttgtacaattccggatatccggagcactccatccgttctgtcacactttgcgccatctcatacatgctctcaaaatgtgccagaaaacgacgctcaaattcattttttgtgaccctggaacggataaatgcccgcacttttttcaattcccggttgtgccgccttaattctgacagcatatctcttcctgcaaaaggtttcagttctatctctaaaacaggttcatgatccgaagcctgaggaatcatctcctgcatcttttcttttgtccacgcaccgtcgccaagaatttctccccaatccattctctgatgcaaaagtccgagagcctgtgccgcttccagcacatcccgctcccttcgtacctcacactctcttcccgaaacccattttttcagcatgtactttgttccatcctgggatacgctaaagagttttcccgccttcgtaaagatgggtgtgtccaccttcattccgtgtctggattccagataacagagcaaaacatacatcagaggtgcgcgcccaaccgagattcctgccggtccaagcagcatcagcccctcctttgtatcgcaaaaataagcacccctggtcttgcgggtgcttatcacttctatgtcatactgttccagaacttctaactcatattctctcatacttgccccctgcactttgccccgccgaaagcagggcggattcatgactctttctaatctatgaatcccggtgagcaagtatgctaaaagccaaatctttctttcacgtaatcacacaattttcctttttgattccatgccggatcttcgatcaccatatccagcagctcatttaagagcgttcccagttcttttcccggcgctattccgagattgatcagatccgttcctgtcactgccagatcttttaatgtcacacattctttgtttcgcagcgcatttcgatacagttctctgatctgaatgatattttccagctttcctctgcgttcataagaactctgcgcttttgtatctgcaagccggactgccagataatatggaaagagttccaccccgatctcatgcatggcgcggcgcacgttcgctccggtcggttccatccggtaatcatgatacgcaacaagctttgttacttttcgaatcgtatcattatcaaatttcaaacgtttcatcactgtttttgcaatttgctcgctggcgatcgcatgccctttgaaatggtctcttccattttcatctgtggtcttcattactggttttcccatatcatggaacaacatggttagtctgaggactttatcattctttacattctgcagcgcatgaactgtgtgtgcagctacatcatatttatgatgcggcgtattctgcttcacaccgaccatgtcatcccattccggaagcaccacttttgtgattcccagctcacaggcatcctgaatccgctccggatgatcggataccagcagttttaccaactctgcctgaatccgctctgcactgatcttttccagattcggcgccagacttttgatcgcttctgcagtctccggctcgattggaaatgccagctgcgcagaaaaacgtactgcgcgcagaatccgaagtgcatcctctgaaaaacgctccttcggatcacccacacaacggatcaggtgataattcaagtccctcattccgccaaacgcatccaccaggcgctcatcatcattgtatgccatggcgttgatcgtgaaatcccgtctctttaaatcttcctccagccggcttgtaaatgtcacctctttcggatgacggccatcctcatacagtccgtccacccggtaagtggttacctcaaatccgtcttttccaatcagaactgttaccgtcccatgctcgatcccagtgtctacggtacgtcggaagatccgcttcacctgctccggctttgcagaagtcgtgatatcccagtcctccggttttctgttcagaatggaatcccggacacagccgcccaccgcatatgcatcataaccatgtctctgtaagtttttaataatcaaaactacttttcttggcaattctattttcattgaaactcttcccctttattctatggtctaccctgtctttccatttctatctcatttaaaatttcaagttcacgtttttggcaactaaatattataacctgtcttgactgttcgctcaaccattttagcgtatattttaatcttttttcgtcataacatccaaacgcatcatccaggatcaccggaacttcctcgccatacagaatctcaagagctgccattcgaagtgcaaaataaacctgctccacggttcccctgctgactcgttctgccggaatccgccgcccttctgataaaagaatcagtttcagagaatcctcgatcagaagccttgtatactttccatctgttacttccgcaaggatttttgatgctttttcattcagtactgtaccgaaatcttttgacatggatgccgctgccttctccattgtctcagatgcgatctccagtgcccgtgccgtctttttcagcctctgctcctcttctccggaaaaatccagctcctccagctgttcttttacattatttaaactgacctgcttttccttctgttcctccccgatgcgctgcagcgtccagtacagcttctgctttttctccctgtaaccagattccatcgtttctcgttctttgatcctgacacttttttgtgtctgcgcgtcttttattccccaaataagaaacaaaatacttaccgcgactggaatcaatgtatatacactgtgcaaaatcacgccgactgccaacagacacatggctgcgattatctgccagctgatttttttcttctcctcttctgtcacatgctcaggttctcttaaatctgcaagctgtcgcttcttttcctgcatctctgactccaaacgcatcttttcctgctgaatatactgatattttcgttgaagtgcctgccgtttctctgctttttccgattccagctgcttccatttccgggtgatttcctttttgcgctgctttaagtgctcctctgcccctgccagatctactccgctgtttcctgtttcgtaataatttgctgcataattctgaagctctgccgccagactttgcccgggtcttgctccaagctgtccgatcgctgccgtattttcaaactgttccgctgtcaatccatttaacagcatatccagatcaccatgctccacagaaagttcctcaccgtcatcctcgcagatcagcacagctccttttgtgtaccggtcaaaacgccgtttcagacaaaaggtcttctcaccacaggaaaaccgcatcgttccggcgtattcattcggattctcccacggttcaaaccggctgaacgcatcattgtgcgccgcttttccgcgccctctctccatcccgaagagcatcgcttttaaaaatccgtaaatcgtggactttccgaattcattttctccatagaacacttggatcccgtcccgaaacacaaatctctgatttgaaaattttccaaagtttttgatctcaatctcttttatcttcatgccttctcctactgccggtttgccatcaatgcctgaattccttcacaaagcgcctcatactctacgcttcctgtctcacatcccccaaacgcttcaatgtattttccgatcagattctcctgatttgccttccacagttcttcaaaatcataatccggaatcgtctcatccacaatttccagaatattcccatatctatccttggaacccgtatcaaattcaatatccggatccctctttcccgtcagaatgaatttgtagagattctctcttccatgctcctgaatctgtccccggatcagttcccgcacttctgcatttcccatccggctctctgtctcgagcaccaaatgcagatattcccgttttgccagtggtacaaattcaaagctagtgcctctttctgaaatctctcccctgataaatccatgctttcctgtatcattcttatcggtcggttccaatgcacccgcatatgctgcaagtcccgggatcacctgctgcggcttgtggatatgccccatggcaatatagtcgaatccgcttttttccaacagacttttctgtatcggaagatgtttttcatctccgccgtgaaccagaagaatctcatactttgcgtctccttccgcacggatcccgccatcaaaaggtgtcagtatctcccgtgactcatagctgaatcccgtcactgccacatcaagatcctcaaagatcacacactccggctctttttcaaacagcggatatacattgctgctccactgaaagctccggtagtaagaatcctgctttaaaaaatcatggttcccggcaatcagaacaacctttgtccgggaaagtcgggaaaaataatagtccacttcttttaattctttcttcagcggctgtctgtggaacagatcccccgcaataagaagcagatccgtctgttctcgctcacagatgtcgatcacttccgcaaaggtatcccacaattcctgaggccgcacctttgaataagcgtctcccgcatccggagacgcacccagatgaacatccgcaatgtgaatccattttaccatggtatctccctcctgtctcttttatcagcaaagagggtgctcaaaagcacactgcctttggtcaccctctttcaattctcttatagacttctccctggaaatcttataaatcacagttatttacagttctcgggaacggaatcacgtcacggatattggacatacctgtcagatacatcacacatctttcaaatccaagaccaaatcctgcatgtctcgtagaaccatattttctcagatccagatagaacttgtaatcctcctcgttcagatccatctctgccattcttgtgcgaagtttttcgaagtcgtcctctctctggcttcctccgatgatctctccgattcccggtaccagacagtctactgctgccactgtcttgccgtcatcattctgtttcatatagaatgctttgatctccttcggatagtctgtcacgaataccggacgtttgtagatctcttctgtgagataacgttcatgctctgtctgcagatctgtcccccaggaaactttatattcaaacttgtcgttgttcttcatcagaatatcaaccgcttctgtgtaagtcactcttgcaaagtctgaatttaccacattgttcaaacggtcaagcagtcccttgtccacaaatgagttgaagaagttcatctcttccggagcattctccagaacataggagattacatattttaacatggactctgccagatccatattgtcttccagatctgcaaatgcaatctcaggctcgatcatccagaactctgccgcatgtcttgtcgtgttggagttctcggcacggaatgtcggtccaaatgtataaatgctcctgaatgcctgtgcaaatgtctctccgttgagctgtccgctcactgtcagattcgtctcttttccaaagaaatctttgctgtaatcaatgcttccgtctgcactctttggtacatctttcagatccagtgtcgtcacctggaacatctcacctgcaccttcacagtcacttcctgtgatcagtggtgtgtgtacatacacaaatcctctctcctgaaagaactggtggatcgcatatgcgatcatggaacgtactcgaaatacggcctggaatgtgttcgttctcggacgtaaatgagagatcgttctcaaatattcaaagctgtgacgcttcttctgcagcggataatccggtgcggacgctccctctactgtcacttcgtctgcctgaatctcaaacggctgttttgcctgtggtgtcgctaccagtgtaccggtcacaatgatcgctgctccgacattctgtctggagatctcatcaaaattctccattttgtcatgatataccacctgcagaggctcaaaataagaaccgtcatttaccacgataaatccaaatgtcttggaatcgcgaatactgcgaatccatccccctacagttacttttttatccagatactgttctctatttttaaataattcccgaactgtcactaattccataccgctcactccttcttttcaaatctgtctctgccgcaaaacggacattcaataaaggctattatatcatatatcctatgcttttgtccaccggtgtatcgtgtctgttcccggactgcacaattccagaaccgtatgatcttcacttaatgtatactcatattccagactgccgccctccatgaccagattcagtttcaaaataccttctgcatctttgacaacgccaaatgttccctttgtttttcctgaggatcctttgatcacaacagttccgtcttttttgaatgtgtattcattctcattgtcatctttccaggttcccagaagcccggatgcctgtgcatctgatatgtcaatgcgctcgatatccgactgaaacaattccatatccttgcctccgtccagtgacttgagcttcagaccatacccagtcgtatcatcctcaatcgcatacaactgttctttctcttccccgtccatcttgatccccattgtaatattgtcatcttcgtcaaatccacactcaaacgtaagtgcttttccgtccagtgtcccggttccatcctccttcagatcataaaccgattctgttccgaccacatcccacttctttgccagaacctttgtcactgcctcactcggcagaatatagccgtcaccaagcttttctttcagttcatcagatgcctgattcacttcttctgttttcgatgctgccggcttctcctcttgtttgctgccctgacatccggtcatcgtgatcgctgctgccaggatcagcactgctgctaattttttcatatgattcctctcctgttgattgttcgtttctcatacgcataaggataccataatcggagagttttttccattttgtttcaaaaactctgctaaaaaagataagatttaaacttgaaagagacatagaaagaaacagaagcacaaaatgacttttctcatctcatgcttccgccttctattactctatattcttactcctgatcctgaccttgcccaacagcaacagttggattatgcagcaatttatgctccttgccttttaaaattccattatataccgttgccacgatcgggttctcattggacagcttaatctgtgccatgctgtcgatcttgtaaatgccttccagacgggctttcttcgtcctcggtccaatcggaaccggctgtccgccccctgcaatgcatcctctcttgcatgccatcacttctacaaagtcataatgcacttctccgtctttcatccgatccagcagttctttggcgcaatgcagtccatttacgactgcaatctttacttctcgcccgttcagatctaccgatgcctccttgattccgtccacaccgcggattccggtaaaactgattgcatccagcacttccgaactgctgttgtttttcagccggcgcagaacagcttctgtcacgccaccggtcacaccaaagattgctcctgcaccggatgaaagtccaaacggcatatccagcgcttccggttcaatccgggaaagatcaataccagcttcctgaatcatccgtgttacttctgtcgttgtaagtacataatctacatcctgctttccttcggtaaaatgctccggacgtttgatctctgctttctttgcagtacacggcatgatcgaaatcacaactgttttgcggttcttcgttccttcctgcgctgcctttttctcttctgttctggcttcttctttcagaagcgccccaaacatcgcctgtggggaacggcaggtggagagattcttgcgaaactggggataacggttctcacagaattttacccatgccggacagcaggaagtaaacagcggaagattctccccggattccagacgctctaccagttcttttgactcttccatcacggtaagatctgctccaaaattggtatcatagatttcgtcaaatccaatcattctcagagctgccaccaaccgccccagcgtattctcacctttcggaattccaaatttgtcaccaattgccacgcggactgcaggcgcaatctgtgcgatcacacaggtatctttatctgccagggctgtccagacaggagcaatatcctgcttaatactgatagctccggtcggacatacaacccggcactgtccgcatcccacacagtctgtctgagacatcgcccggtcaaatgccggcattacctgcatcttagaaccacggaaggcaaaatcaagaatcccaagtccctggagctcctcacaggttcttacacaatctccacacagaatgcatttgttgggatctctcacaatacattctgaagactcatccaacggcaggattggtttgtgattctcaaatcttacctcgtcaatccccagctggcgggacagtgtctgcaaagtacagactccgttctcggtacaggtcgtacagtctctgcagtgagaagaaagcagcaattcgaggatcatctttctgtgatgctgcagccgtggtgtatgcgtatagatcaccattccatctcttggtacttcggagcaggatgcaaaaatcttccctctgtcatcttccaccacgcacatacgacaggcgccgtatgttgacagttccgaatgatagcagaacgtaggaagatcaattcctgattttcggattacagaaaggacatttttctcatctgtaaatgctacccgtctgttattaattgtcatatatcccatatcttctgcctcctactcttctatatgaatggcaccaaacgcacaggaactctcacacgctccgcacttgatgcacttgtcattgtcaattacaaacggttctttgattcttccgctgatcgctcccaccggacagtttcttgcgcacttggaacatcccttgcagcgctccggactgataatgtatcttctaagtgcagtacaagtatgagaaacgcacttcttatccaccacatgctccacatactcatcccggaacaatttcaatgtactcacaacaggcagagccgcactcttcccgagaccgcaaagagctgtctctgtaatcatatttgccagttcctccagaagatccagatcttccagttttccgttgcctgccacgatccgctccagaatctccagcatccgcttggtaccttccctgcacggcacacattttccacagctctcattctgcgtaaaattcataaagaaccgggcaacctccaccatacaagtgtggtcatccatgacaaccagaccgccggaaccgatcattgctcccatcttcttaagagaatcaaaatccagattgacatccagatgccttgtaaccagacatccgccggacggtccgccgatctgtactgccttaaatttaccgtcctctttgattccgccgccgatatcgtaaatcacctctcttaaggaagtccccatcggcacctcgatcagaccggtatgcttcacacttccggtcagcgcaaatgccttcgttcccggactgttctcaggtccaatactcttaaaccatccggctccctcattgatgatcatcgggacattggcaaatgtctctacattattaagcactgtcggtttcgcaaacaatcccttctctacagtacgaggcggtttcacacgcggcattcctctgctgccttcaatggatgctgtcaatgcacttccctctccgcagacaaatgctcccgctccgcgattgatatggagatggaatgaaaaatccgtacccagaatgtgatcacctaaaagtccacactcttctgcctggctgatcgccagcttcaaccgactgatcgccagcggatactctgcccgcacataaatatagccgtctcttgcacctaccgcataagccccgatcatcataccctcgatcatcttgtgcggatcgccttccataatactgcggtccataaaagctcccggatccccctcgtctccgttacagacaatgtaacgtatcttctccggctggcgtgctacctgtgaccacttatatccggtcgggaatccgccgcctccccggcctcgtaagttggattctgaaatctcttcgatcacctgtgcaggagtcatctcaaaaagcaccttctccagggcacggtatccgcctgcagctatgtattcctgaatatgctccgaatcgatatgtccgcagtttttgagaacatttcttgtctgctttttataaaacgggatctcttcctgtttcttatattcgattccatcctgtttaaataagagatgccggatcacatctccccgttcaattgtccggtaaaaaatctcttcacaatcactcaactgaactttggtatacaaaatccccatcggttcgatccgcatcagaggtcccatttcacaaaacccatgacatccgctctttttcacttccacaggtcccgtcttttgttctgcctctgtgtgagcgatctccggtccaaagaacacatccacatccggattctctgcggtgagctcacacattttctcataaatctccccggaaccgcctgccagacagccggttcccgcacagattaaaatccggcatcggcttttttcaatcttttctgaagtttcttttcggacctgctgcagaatctctctgttttcaattctcttcatatgccttacgctcctctcaactcgtgaatcagttctgctgccgcatccggcgtcatcttcggataaaccgtatcattcaccgtcaaaacaggcgcaagtccacaggctcctaagcaggaaaccgtctcaacagtaaacagcatatcatctgttgtattcttctctccggaaatccccagctcactgtagagcctttccagaatcggaattgattttctcacatgacatgctgtaccattacagaccttaatgacatattttccttttggttcaaatgagaaattctcataaaatgttgccacactgtacgctttggcctcactgatgccgattttttccgcaacatagcttaaaagctctggcggcaggtagcgatattcgctctggatatcctgaatgatcggaatcagagattcctgataagctccatgtgatgcaacgatctcatctgctttgtcatagtagctttgatctaacatataatcctccttttggtacatttttgtatattttattacattttcagtgcctcttgcgtaatattatatgttagaacatacaatcattcaatattttttatccagttttctatgaacattttgtaaaccattactgttcacagtaactgtgaactttctccaaactcaggattttaaaaaagaacaaaagcagaagaacagctttgcatttcacagccaagtctgagccacgcgatcgcacagctggaaaaagagctggggatcccgctgtttgaaaaaaacggaagaaatacaaccctgacacgattcggagaagaatttctctcctgtgcggaacacacgctgtctactctggatgaaggaatcacaacactccacagaaatgcacggggcgaaggtctgatccgcatcgggatgctcaggcctcttggaatcgaatacattccccgtctggctgccggtttcctgaaagcgaacccgggacaggacatccagtttacttttcatacaggtgtcacacaatatcttctggatggtctggctgcacgaaaatatgatcttgtattctgctctcagccatctgaagaacacaaatttacagcggttccgatacagaagcagaatctgatcatgatcacaccgcagtctcatccactgtctgctaaggacagcgtggatcttgttgagaccattccttatccgcagatcttctttgaaaagagcgccggtatccgaaatgtcattgaccagatgtttgccaggacaggcgcctctcctaaaatagcctatgagaccgaagaagatcaggtcattgcaggtctggtcgcacagggattcggtatcgctgttgcaccttatatggatattttacagaaattgaacgtcaacattcttcagatccgctctccaaattatgagcgggcattctttatggtgcataatgactgcgtatttataccgcctgtagtacagaaattccgtcagtttgtgttggatgacgggatgatgctgacagaggaacctgcctgattatacaaaaacatgatctgctctcagacaatcctctatctgaaaacagatcatgtttacgttctattataaataaaatacttcaattacatccgggaatgtttgttccgaatactctctatatgagatttttttattttacaactaccttcctgaagttcttcttaccttttttcagaacgataccctctcctgacagtgcatcttttgtaaataccgcatgaatgtctgcaactttctctccgtctgctgcaactccaccctgctgtaccgcacgtctcgcctcagatttagatggaaccagaccactctttaagagcagtgtcagaatatcaatctcatttccttcaaaatcttcttctgtcagctctgctgtcggcatctgtgctgcatttccctggctgaacaatgctcttgcactctcctgtgccttatttgcttcctcttctccatgtaccagctttgtcagttcaaatgcaaggatttctttggcagtgttaagctgtgcaccttcccatgaatccatcttgtcaatctcttccaacggaaggaatgtcagcatacggatacatttcagaacatctgcatctgccacatttctccagtactgatagaagtcaaacggagaagtcttgtttggatcaagccataccgcaccggactgtgtttttcccattttctttccttcagagttcagaagcaatgtgatcgtcatcgcacttgcatcctctcccagtttccggcggatcagttctgttcctgccagcatgttgctccactggtcatccccgccaaactgcaggttacatccgtatttctggtacagtgcatagaaatcgtacgcctgcatgatcatgtagttaaattccaggaaacttaatcctttctccattctctgcttgtaacactctgctgtcagcatacggtttacactgaaatgtgcacccacttcacgaagcaattctacataattcagatccagcagccagtctgcattgtttaccatcagggcttttccttcagagaaatcaataaatttactcatctgttctttaaaacagtcacagttgtgctgaatctgctccggtgtcatcatagaacgcatatccgttcttccggaaggatctccgatgtatcctgtaccgcctccgatcagcgcgatcggtttatttcctgccatctgcagacgtttcatcagacaaagcgccataaagtgccctacatgaagactatctgctgttggatcaaatccaatataaaatgttgcctttccttcatttaccagtttggagattctctcctcgtctgtcacctgcgcgatcagacctcttgctttcaattcgtcataaatctgcatcttttgcatcctcactttcctaaaatataaaaagagccttcatccgaaaggacgagggctcataagctcgtggtaccaccttttttcacagacgactcgcgccatctgcctctgtgagtcaatctcgcaccttttcgatactcaatcactcagtgcagtaacgtgcaccaatccgtcacagcctactttcctgtaagagttcggtgtgaagctctgagatgtattcatacaagatgtcttcctgcgcctctcatcagccggctgctttctgtcttcgtccattcctgtactacttgttctcttctttgcctgtttcatatactatcgaaatcttatcccattcccccttgtttgtcaaggctgatttgagattttctaaagttcctgcagcacctgcactgctttacggatgttctctgccgaagtctgccagatctcaaattcactgaatcccggaatccccatcggtacaccttctctccgaaactccatccggctgtcaatcacgacttttccggacatatggtatgccttcgcatttgtgtaaggagccagttttgcgatactctccggattgatacctgcccccgccagaatctcaatcctgcctgcacttttcttcaccagatccttgatcagatcacgtccctcccaggcagagcttttctgtccgcttgtaaggatcgtatcaattcccagtgaaatgcactgctccattgcctcataaggatcccggcaaacatcaaaggcacggtgcagcgtaattcccatgtcccccgcttcttccacaagagccttcatctgctccatattcaacgttccgtccggattcaaaattccgatcacaatgccgtccgcccccagtttacggaacattctgacttcatccagaatcatacgaaactcgtagtcatcataacagaaatccccaaatcttggacgaagaagtacacgcacatttaaacctgtctgctccttcacctgacggaatagggattctcccggggaagtccctccgatcaccagattggaacagagctcgattctgttcgctccgccttttttcgcttcgatcgcggactgcacactgtccgcacatgtctctaaaatgtaattcattttggtctgcctctctacaatttttcatttttattttcacttatttctcttatcaagaaaggtaagcaacgcaatataataacttcgtatgctgccctgtgcgccccctgtcacaggtctttcctgtttgagagtctatcatactttccatttgatttcaacaaacttcttatcccctccactccactcaaaaaggccgcttacagcggcctcatgagtaaagggatttaaattttgattttatttacacaattttttgaactcgtcagctacgaactgaacttttgttccgatgataacctgtacggatgtttttccaggacggattactcctgcaacacctgcagatttgatcttcttctcatctacttttgtgtaatctttgatttcaagacgaagtcttgtgatgcagttgtcgatggatgctacgttttcttttccgccgacaccctccagaataattttagcaacttctgtgaagttattgtttgcaagttttactgttgtctcatctacatcatcatcctcgcgtcccggagtctttaagttgaacttcacgattgcgaagcggaacaccacgtagaatacgatgaatgctgcgattccaagaggaatgatcatccatgttttctgagcagctggaagggatgctgagaataacaagtctgtcgcacctgctgagaagctgaatcctgcgcggaatccaaccaatgttgtaattgttacgaaaataccatacagtaaagcgtagattacatacagaactggagcaaggaacatgaatccgaactcgaatggctctgtaacaccacatacgaatgctgcgatcgctgcagaagcaacaagaccgatagcaactttcttcttagcaggttttgctgtatgtaccatagcaagcgcagcaccaggaataccgaacatcatacatgggaagaatcctgacatgtacataccaaggctccatgtaacatctgctgatgtctcgcctgcccagaagtgtgtcagatctccaaggccgatcgtatcgaaccagaatacgttgttcagtgcatggtgcagaccgaatgggatgagcagtctgttgaagaatgcataaataccagctccaacagcatccaggcttacgattgcttctccaagtgcaaccagtgctccgaagataaccggccatacaaacagcaatacaacagatgcaatgatagatacaacacctgatacgattgccacacaacgtttaccgctgaagaatgacagccagtcaggaagctgtgtatttttaaatctgttgtagcacatagatccaatcagacctgcgatgataccaataaatggattcgcgattttatcgaatgctaatgtagaagtttctgacagagttctgataacagaaacgtttgctgtagaaagcaggtttgtaatcatcaaccaggaagccagcgcagaaagagcagctgtaccatcattatcatctgccataccaacaccaataccgatcgcgaacaggattgccatattatcgatcaaagctccccctgcttttaccagataaaaaccaatctgctgaatgataccgttaatttctccaccctgcattgtagccggacacatccagtatccaagtcccatcaggataccacagataggcagacatgctaccgggagcattaaggatttacctaatttttgtaaaaatttcatttcttttcctccttctcaaaatccttttccttattggaatccctttatttattttaatccggcaagtaccaccggtttaaaaccatatctataaaactatttttcttctacggtcagaacatcatctccggcgttgacctctttgtctgcctgagctgtcacagccgcataatctgctgtgttgcagatcagcatcggtgtgatgatatcatatcctgcagctttcaccttctcaagatctactgtcaaaagcagatctccctttttcacagtatctccggcttttacatgaccttcgaatccctctccttttaactgtaccgtatccagtcccacatgaatcagaacctctgccccaaaatctgtggtcagactgatcgcatgaagggtatcaaataccattccgatcgtaccgtctgccggcgcataaattttgccttctgatggaatcaccgcaactccgtctcccagaatcccctcactgaatgtcggatcgctgacttctttgagagaaactgccttcccttttgccggtgctcctaatacatgtgctttatcttttttcttcttaaaaagtccaaacatctttcttcctccttttattcttccgcagtcgtcactctccgaatgtggatcgccagatacatgatctcctctcctgacaggctgcattttgtctcttcttcaatatatgcagcaaccatcttgctgcagtcatattctttctgatattttttctgcatcagctccgccagttcagactcctcatccggaagaagctcttttcggtagacccgctgaagcaaaaacttgatatgtgttacaaatctctcataatggagagatgtttcatccaattcaatctgaagcttctcttctacaatttccagtatcttttttaccagattcggaaacttcactgcatcccgaatatctgttccatattctgcgttcaggaaatgaagtgcgataaatcccgcctcatcctccggaagccggatcctcagcttttcttcaatcgtcttgaccgcatacattcccaattcatattccctcgagtaaaacctcttaatctcccataacaatgcattttgcggcttaatcccctgctgatatcttgtgatcgcgaaattaatatgatctgtcagtgtcacatatatactctgattgagctttaacttcagattttctttcgcataggtgatgatatcactggatacctttacatgctcaagcggcatgtctgcaagaagatctttaaactgttctgcaagtgtctgacttttgatccggaacactttctcaatcttgttctcctgaatctgcctgccgggcttcatcccaaacccaagcccgcgtcccatgacaacaacttctcttcctttgctgtctacagccgacacgatattattatttataattttttcaattaacattctataccgaatcctcttttatacgaatctttttcctgttctgtcagttgtgtctggagttccccgtaaaataataaaaaccagcctttacaagagaataaacctatggtattactctctcgtaaaactggttttgcctgcctgacagtaacaatccaatttgattcaattcgttatataaactataccagaggtgacacctcaagtcaaccttccggcagccccgaatttagattttggtaatattgtttatattttttttatattttcgtataaatgtaccaacgcttttttatcttgggattttagacagcgctgcctcatctgccaccagtgtcacatcgctgtgcatctgcaggattgaagccggaacctgtggtgtaaccggtccgaaaaatgcatctcttacaatatctgccttatcttctccgctgacaatgatcagaatcttctttgcctgcatgatcgttccgattcccatcgtatatgcctgtctcggaacctcatctgcggatgcgaagaaacgcttgtttgcttcgatcgtgctctctgtcagatctacacagtgtgtcgtcttatcaaatgcatctgcaggttcattaaatccgatatgaccattgtgtcccagtccgagaagctgaagatccacaccgccgagagaacggatcagttcttcatagcgcgcacactccttttctccatccggctgtgtaccatccggcacatttgtattctcttccttgatgtttacatgattaaacagatgctcatgcatgaaatagtaatagctctggtcatttttacggtccagtcctttgtattcatccagattgacagaagtcacctgagaaaagtccagatcccctttttcataccattctaccagcttctcatatgtaccgatcggtgtggaacctgttgccagtcccagtacacaatccggtttcatgatcacctgtgcagacaaaatattcgctgcttttttgctcatatcattgtagtcttttgttgcaataatcctcatgttccatttcctcctctatccataccagcccgcgaactccaaaatgcggccgatcatcattcatccgaaacggataaatcatatttattatatacttgtttcctgcttttgtacaatctaaaaattgctttcctttttagatattattcttcatactcgattcctacaagaaacagcccctgcggcggagctgtcacccctgcggctttgcggttcttcgcttccagaatctcctgtacctgctccggggtataaaatccccgccccacgcgcaccagtgtccccacaatgatacgcaccatattatacaagaatccatttccctgtatccggatggtaatctcatctcccaccggcaaaatatccagactgtaaatcgtacgcacggtatcctccacatccgtacgcacattacaaaaactcacaaaatcgtgagtccctaccagatactgtgcagcctttttcatcttctcaatatccagatcaaatgacacaaaatgccgggtcagccttcttgtgggatccggtattttcgcattcagaatatgatattcatacgttttttttgaattgcagtatcgcggatgccagtctgccggcacttcttccgatctgatcacaacaatatcatccggaagcctctggttcagggcatatgaaatccgctccggcggaatggaagtttcagaatcaaacactgccacattcccaagggcatgtaccccggaatctgttctgcttgccccgatgaccgtaatctcttcccctgtcagttttctgagcgcacggttcagaacttcttccaccgtaattccattcggctggatctgccatccacaataattcgttccgtcataagcaacggtcagtttcaatcttttcataattttctcaattccttcatcctagaatatccagatatgaaacggcacaaatcttcccagcacaatgatcacagccagatacactgctgtcacaagatacgcaactctgtcacggctgtgatacacgagcggtttcatcttggtacgcccttctccgccacggtaacagcgcgcctccattgccatggcaagatcattggcacggcgaaatgccgatacgaacaacggaaccagaatcggaatcatggcctttgctctctgaatgatatttccactctccagatctgccccacgtgcaatctgtgctttcatgatcttgtctgtctcctccagaaggatcggaatgaagcgcagcgcgatcgacatcatcattgccacctcatgtaccggaactttcactttgttcagcggtcggagcagcttctctatcccatctgtcagtgcattcggagtggttgtaaatgtcatgatcgacgatcccgcgatcagataaatgagacggatcgccatatataccgagatttccagtccatcttctgtaatttgaaaaatccagaaatgaaccagcacctctcctccgttattcaaaaacagattaaatgctactgtgatcaagagcaggatcataatcggttttaagcccttcataataaacttcaaaggcactttacttaaatggatcacccctgccaggaacaaggttgcaaccagatagccgagtacgcttttctgtacaaacaacgagatcagaaataacagtgtcgccacgatcttcaccctgggatccagacggtgtattacgctgtttgccggatagtattgtccaattgtaatatctcgaatcataattttgtttcctccggatgcttccctctaaaatagcgcatgatctcatctgccgcctcttctactgtcgtcacatcattgccgacctgcagtccattctgccgcagatcgtgcataatgtaagttacctgcggcgcagcaaggccaacctcttccagttcctgataatgtgcaaacacttcccggggcgttccatctaaaaacttttccccgcggttcatcacaataattcgatccacatatttcgcgatatcttccatactgtgagataccaaaataacagtgattcccgttttcttgtgaagctctgcaatctgatccagaatctcatcccgtcctctcggatccagtccggcagtcggttcatccagtaccagtactttcggacgcatggcaagaactcccgcgatcgccgcccttctcttctgtcctccggaaagctcaaatggagactgtaaatataattcttccgggaaaccaaccagttccagagcttctttcgcccgtttctcgcactcttcttttgaaagcccctgatttttcggaccaaagcatacatccgtcagaacatccacttcaaacagctgatgctccggatactgaaacacaagtcctacctggcttcttaaatacttcatatcgtatccgtcttcatagatgttctttccttcataatacaactctccggatgcagctttgatcagaccattaaaatgctggatcagtgttgattttccggaacctgtatgaccgatgatcccgagaaactgtccctgcggaatctcgaggctgacatcttttaacgcctgtttttcatatgcagttccctgaccgtaaacatactgaatgtgttttaattcaatcgacataatacctccaccagttcctctttcttcaggattcctttcgggatatccaaacctctttttctcagttcatctgccagcatcgttacctgtggtacatccagacgatactttttcaatttttcctcctgagagaatacctcttttggagttccgtgcatcacaacatgacccttatccataacaaatacctgatcggcctcgatcacttcttccatatagtgggtgatcaggatcaccgttacttttttcgtcttctgcagacggcggacagttttgatcacttcttttcttccattcggatccagcatagcagtcggctcatctaaaacaatacactttggttccatagcgatcactcccgcaatggcaactcgctgtttctgccctccggaaagcttgtttggggaagacttgcgatactccagcattccgacatctttcaggctttcttccacccgcttccagatctcgtccgccggcacgcccagattctccggtccgaatccgacgtcttcttctaccaccgttccgatgatctgattgtccggattctgaaataccattcctgcggattgtctgacatcccacagattctccggatctttcgtatctcttccgtttacccacatggttccaccggacggcaccaggatcgcattcatatgctttgccagcgtcgactttccggaaccgttgtgtcccaggattgccacaaaagacccctccgggatatcaatatccacgccgtcaatcgcacgcttcataccgatgatatttccctcttcatctcttttttcatattcatagatcagctctttggtctgtatcatttttagactccttttctctgtttacaaagataatccctgcactgaccagaatcagcgccgccagattctgtattttccagatgtcctctccaagaaatactgctgagagtgttacaccgaaaacagggatcgtaaacccaaacaccgctactttcccaaccgggttatacttcaaaagcaacgcccatatgctgaacgcaaccgtggacagcagtgccatatacaataaaagcaacacggaccgcatcgtaaatccacgcacgtggccgccaagcaaaacacctgccaaaatcagcattcctccaccgaataaaagctgaaaagctgtaatcgcagtgggcgtttctttccccgagagcagcttcaatgtcacagaacttgctccatatgccatggaacagaccaggatcagcccttctcccatccactgaaatccaccggccattccacccggtgtcaggttgatcacgatcacaccggcaaacccgatcaggcaaccgatgctcttcttccacgtcattttctctgattttatcataaaatgtgcaaatatcaacgcaaaaaatgcgttcgaagcattgatcaccgaaccttttgccccggttgtatgtgcaagaccgatataaaaacagatgtactgtataaatgtctgcaacattccctgtccgaaaaccggcagtacagaacttcttcggatcataagccagcgcttctcaagaaaacttccgatcagaaatgtaaagattcccgccaggaagaaccggtatcccgcaaacaggatctggctgcccgcgccttcgatcgccagccattcatatcctatcttcacacatggaaaggcacttccccacaatgcacagcaaagcagagccagagcaaacacaacacctggattttgtaatttcttttccatatacaatgtgatatcctttcatttttaccagtttcttagtataacacatttttatagaagaaaaaagtagagttgtcgcattgattttcatcaatatgacaactcgtatatacatccaaagtgcatttcaaagtacaaaactgcccttttgaatatcgctttttactatttatcaactacgccatctccggctcgccgtactcttctccgaaagtctcgactgtcacttttttcattacctgaggctccagtggcttgtcactgtagtctgtggctgtgtctgcaattttattcacaacatccattccctctgtaatctttccgaatgcagcgtatgctccatccagatgcggggatttcttatgcatgataaagaactggcttcccgcagaatccggatgcattgcacgtgccatagacagaacaccttcatcatgtgccagattgttcgtcacgccattctgaaggaactctcctttgattgtatatcccgggccacccatacctgttccgtccggacatcctccctggatcataaatccgctgatcacacggtggaatgtcagtccgtcataaaatcctttctttacaagcgatacaaaatttttcactgtgttcggtgcgatctccggatataactccgctttcatgatatcgccgttttccatttcaaatgtaacaactggatttgccatatgttttctcctcttttctatcagactgcggctttgaagaagccgtatatgaagttattgtagcggatttgcacgatttcgtcaacgcattgtgtttttctggaattttctgaaaacttgctgaaaatctcttgattttttcctgttatcgcagtatttttaaatcgtaagtagtaagtaataagtaaatataaattttcttatccacgaggagggttttcctatgacgaacttatcattacaggaccgtttttcactcatttcattaaacgctttaaacagcacacgtaattctactgcaaaaaaagtagcaattcgctgtatctctgcagccggtgtactggatcgatttctacaggaaacagaagagctcaccgaagactctgacgaataccgctccagattggatgctttatctgtttctttgaaggaagcagctcatttatcttcttctgctgcaaaagagctggaacacacagtatatacccgtttaaataatctgggactgatgacagaagcatcctccctggtcagctgtgatctggagttttcttctgccggaaacaagattctggaataccgcacggattccgatgaatattcacggcagacagagagtcttcgtgcagaactgatggaagaaggcaacgtattcgatgaaaccgtatgtatgctctggctgctgcgtgagagcagctgcttttatgacctattttcaaaggaagaacaaaaatacctcacttccagaattaacgagttatacctgaactcccttctggcaaaaacactgctttccgtttccatccacaatgcgcttgacagtgcggcacttgggctcttttcgaaaaagaaagcgattttttccacccagctcggtaccggggttttatttcaggttccgtttatggaacgttccagtgccgttttcattgagtctgaagaattatattgtaatgccgaaaagcgtctggaaagcgtcattgccagattggaagaaaacggaaatgaagtccatgtgatccgcgcaggcacggtacctcttcttcagattgacaatctttattatgaatgtatcccgacacagcacaaatattaccgggttcctgttttcggtgttcagcttagaagatatattatgtaaaaggagtgttcttatgtccagacaacgttctatggagaaaattctggtctcggaatatgtttcgatcggcgagctggtgcgcatcaccggctgccgctacagtactttaaaattttatacagaagaaggaatgctgccatttgaacaggcagaagaaaatctgacacgccgcttccccagagaggcggcggtcgcaagaatcgaacagattcgttctcttcggcaggacggactttccattcctgcgatcaaaaagcttctatagtcactttgtacaccattatctgttttttttagttactcgtaacattgtctgttttggcctccaaaggtatacttaattacagaaaacaacgaaacactgattttaaggaggctatttaaaatggcaagtttatcattaaaaggaattcagaaaatttatccgaacggatttcacgcagtaaaagatttcaatctggacattgaagacaaagagttcatcatctttgtaggaccttccggatgtggtaaatctacaacacttcgtatgatcgcaggtctggaagatatttccggcggtacactggagattgacggaaaagttatgaacgatgtggaaccaaaagacagagatatcgcgatggtattccagaactacgctctgtatccacatatgacagtatacgataacatggcattcggactgaagcttcgtaaagttccgaaagatgagattgatagaaaagtaaaagaagcagcaagaatccttgacctggaaaaactgcttgaccgtaaaccaaaagctctttccggtggacagagacagcgtgttgctatgggacgtgcgatcgttcgtaatccaaaagtattccttatggacgaacctctttccaacctggatgcaaaactgagagttcagatgcgtatcgagatttccaaactgcatgaaaatctgggcgctacaatcatctacgtaacacatgaccagacagaggctatgactcttggtacaagaatcgttgttatgaaagacggagttgttcagcaggtagatacacctcagaacctgtacaacacaccttgcaacctgttcgtagcaggattcatcggatctcctcagatgaacttcatggatgctgttgttgatatcaaaggaaatgatgtaacattgactgtcggaaaacatacactgaaagttcctgcatctaaaaaacaggcactgatcgacggtggatacaacggaagaactgttgttcttggtattcgtccggaagatgtacatgattcacaggcattcatcagcaattcacctgacagcgtgatcgaatctacaatcaaagtttatgagctgcttggagcagaagtatatctgtactttgacttagaaggtacacagatgacagcccgcgtaaatcctcgtacaacattaagaaacggagatcacgcagtatttgctctggatatggaaaagatccacatcttcgacaaagaaacagagttgacgattacaaactaatgttttaaaatagttataactaaaaatgacagggggctgtacgattgtgcagctccttctctgtctaccgggagaaacactatgaatcatacagccgaattagagaaagcattgacagacctcagacatattaccggaatttctatggagattcacgcagaaacagaagaagaagtgacaaaagcgctggagcagttaaagctcctttcctccgcatacaaagaaaagtataacaagattcattttcttcagagcctgatgacagacagcatccctacatataatgtatatgaccgggccgcccgtcttcacattgctccggaagatccgcgtatcctttatcttctggagacttctcacagtctggatgaagatatttccgagattttaaagaatctctttccatcccagtcaggagcatttcgaattccgctgacagaagcttcctgtgcgattctctgtcctgtcagatctctggcagattcttcacaggaaactgtacatcttactgcccgcatgatcgtggataccgtaaacgcggaagctctggcacgtgtccgtgtttcttacagcaagactctgcataatctgctggatctctccactgcttttcgtgagacaagtcttgcactgaaagtcggtaagctgttttattccgaacagacggtatttccatataaccgacttggaatcggacgtctgatctaccgtcttccaacttcgttgtgtgagaattttcttcatgaaattttcggagaggagattccacaggcactggatgaagaaaccactgcaaccgttaataagtttctacagaataacttaaatatcgcagagacctcccggcagctgcatatgcaccgcaatactttaatctatcgcctggagcagattgaaaagcggaccggtctggatcttcgccagtttgaagatgccatgacatttaagatcgcctctatggtaatgaattatttatatactgaaaggaatacaccacatgaatgacgcactttatgaacaattagttactcgtaaatcccgacctatggacctcgtaatccgtattttgtgcattgccgctctcgtagtcgtgctttgcggaggtatgctttttatcggttctctggcagctctcgttacgattcttctcggagttctgatttactactttgtatttccgaaactcgatgtagaatatgagtatacacttttgaaccacgatctggaaattgacgctatttacagtaaatcaaaacgcaaaaaactcatgactctggatatccagcaggctgagatcattgcgccaaaaaattctcaccgtcttgattctgtacacgcagacaagacaaaagatttttccgcaggtacaggcgaaggtacttatgccattgtaatcccggctgaacagacgatgagctgtatcctgatcgatccggatgaaaagatgctggatcatatgcagcaatggatgggcatgaagatgttccgtgactaatatgaaattgaatcgctgtaaaatgactgagtaaaagttgttttacagcgatttttttatttttgcaactttttactttctgtttttatctaatgtgtaacaatcgattgtaaaaaaagcctttatatcggtttctatcagatcagtcgaaatgctctggaagacggtacatttccggatgcaatgacggtagacgtggccattgatcaaatatatgccgaaccatcttctcctggcatgattcctgatacaataaacggaaactggaaactccaagtaatctatattttacattgcaggttcctcaggaatggtcggataaaaatcctgctccccttgtcactaattccaatggagaggaaatttctattctgagcggatactgtacatctctggaagatggcagccagcgcttccactatacactggaatataatgatgatacagaatttacagttcagatattagataaaaacaatgccccttctgatagcacgattcctgtagttgctgaaattcctgtaagtatgcaataatgaaccattggctcaaggatataataagcccaccctgactcgctaaagtaagggtgggcttttcatgtcttatggcattatcccttccaatatctttccacgacttctactatgatttccagtacttttctacctccttcgctgcatctgacagagaaaactgaaatctttcctgaatttttacacatacaatttctttctccattcccatttcctgaagcaactctactacggcctgtatgccttcttgccggccctcctgtcgcccctcttgcagaccctcttgtctcccctcttgcagaccctcttgtcggcctatttttagaccttcttttcgtccctctctaagcccagtctctttgtaaacagtagaaaaatactggtgatctcgaatcgcacgctctcttgcttcatattccagacgcttttcttcatctgcactgatccggttcagatcctcatacgccttcttaatatatttgcttttttccgctgccatttcaaattcctccttgctctctgcattgataaactgaagccatttcagcagctctgtctccggatactcatgttttgccagcttgggaagttccagcgtatggatttcaaacttatcactatacatctttcttccctgatccgaccagaaatgaaagcgggaatagtattcttcatcatcaaacaatgtaaaatttaaaatcccgacatgaatacatttttctaatttttgatagtcttctcccggttttagctgatccacaaacatctttcccagatagaacaaggtacgttctgcccagtattcactggatgtcacctggatttcaatatcgatctgctccttattatttagcaatacccgtacatccagaatccccagtttatcatctttgtctttctgacgcaggtgggacggcaaaatcctgctctcaacgatttcttccagattgatcccaagtactgctgccagaaatgcattgcgcacctcttcatcttccatcagttctttaaaacagaaatctacctttggcttcattaaaaattgtgttgttttttctttcttcatacacactcctcctttgttctgatggaaaccagaatatttcggcaagtatgtatctatatcattgattttattatatcttttgacgcgatgtttcacaatcgcaaatacagacaaactccctctattcttttatccatctctttactctttatctgggaataacttttgaatggcaattctttgccatatttgaaaattgaaagggattcctttcaagattgattttattatacttgaattttgatcaggatacaattaaatttccataaatatcctgtaaaaagttactgtaaacaataactctgcaagccacagtaacagagcagttccacatggaactgccctacaccaccggaaaccagagtctgatttccattccttttccgtagactgacactgcttctacttctatctttaattcctgtccgatctgccgtaccagatacaatcccatccctgtcgattttttctgtctgttctctcctgtaaatcctttttcaaaaagatagcggagttcatatggttttacgccacacccattgtcgcagacagaaaggcagactctgttgttctcacttccggaactgattttcagcttcggacacttttcggcttcatatcctgtgtatttgatagaattcgcgatcagctgactgagcataaaacacagacttttccggtctgacagtacgattttctttttcagatccaactgcaccaggatctgcttttcttccagatacagacggtattcatccagcacctcccggcagcattcttccagactgatctcttcaaacaaatactctttattcattgctttaaccctggcataatataacatctgctctacataggactgcatctgcagtctgacatgctccatttttttgtgtactgtcggtgacatctcctcacttctgttctcaagcaaaagtgtaaaaagagataatggaattttcacttcatgtgcccataattctacatatcgttcatattcttcttcctgtatcctccctgcatcagcctgcctgtatgcttttcgaagatatgccccgatctcccgcaggatttcctgttcttcatttcctactcccccgatcgcaagtctctcattttcttcactcggatccgccagaaatgtaagaaaccgctctttctttttctgctctttccttacgttccagattaccgcatacaaaaaaatgattgcaagacaactgacttccagtccggccagaactttgaactgctccatccccgacagccacagaaagaatagcgataccagttctgtacacgtaaggatcacaaaccatattttttcttctttgatctcgctccagattcgtctgatatattccatattactgctctctcttccaccgatatcctctgccacggattgtttctatccgattctccagaccaagcgcctttaatgtctttttcagccttgtcacattgacttgaagcgcattttcatcaatatattcggttgttccccacaatacctttgaaatgcactcttttttcacctctgttcctgcatattccaaaagaatttttaaaatcttcccctgattttccggaatatgacaggcatccttcccctgacagaccgtataggttctggtatcaaaaagaaaatcgtctccatccagtaaatgtgcattccccattgcccgtttcagaagattttctgtccttgccagcagacggtctttatgacatggcttcgtcagatattcgtcagctcccaactccagtgctttcaactcatcctgcattttatccctggaggtcagcacaagaataggaaggctgcctttctttcgtatttctttacaaagtgcaaatccactgatgcccggaagtcccagatccagcactaacaaatccggatgctctgcctcacagacagcacccgtttctggaaaatccgttacacaacacacctcatagcctgccttatgataaatattttccagttcttcccgaaggaattgatcgtcttctacgattatgattttttgcatgcctgtcttctactcctgccgttttctctgaataaatttcaaaatcctgcgattgcttgtctttatgactcctattatataagctgtttctatcagacacaagaaaagaaacacacttcctgccatctgccagaaaacttttacttcctgcacctgtccaatcagccggaacaatgtccagaccccaaacacactactgaaaaatgcaacgctcaataccagtccatagtgccaccagatctgaactttcgcacaatgacagagctctttgtagttacttcccagtgtaagcagaacgctgtagcgtgccccggtcttctcctgctgaattaaaaactgaactccaatgagtgtatttgcgataatcaaaaaaatcacagccagatagatcgtcgtatatcccaatgccacctgataaaacatatgccgcccggctgttcccagataactttcataatgcagatcggttgtttttagacggtcattgacagacatcactgctttgagcaatccttcctcctttaccagaaccggatcaagaatcccgttccagtaagaatagcttccgtctgctacaaagacatcaaaaacctcatccggtacaataaaaccatacataatcgtcaacatccggtctgccaccagattgtcattgcatactcttggaatgatttcataatcggtctcttctatctgcacaaaaactttctctttcagaagtttctctacgctctttgcagtctcatccgacaaatatgtggggtgcccgtaaattgccatctgatgttcctttaagttcaaaggttccattccttttgaacgcaaaatctcattgtaccctgattctgcgatcaaaaatggggattcttcccaagaatatggattcaatctgtttttcagacgctcatataattcctcacagtcatatgcatatacttttcgctcctccataccttccgtaaaatccagatctgtccaaagtaatccgtttcgtacttcaaacagatttgaaaaatattggtctactttctgagatgacagcacttcttctaacgtttcttttttctcgtcaaatgtaaaatcgatccctgccgtatcctgttgtcccagttgcccgctcatcccgactccataggcacaacatatgatcgcaaacagaatcagaagggaagaaattgccaacgaagatgattttaaaaataccgcttcctgcagctgacggcatgtaaatgtccagagctttttccccggaagttttctgcatatcctatcaaataggtatgccaggccctgaaagaaaaagaatgtaccgagtactccacaaaaacataaaattgcagtcatacgaaacattcgttttatcccaagttccgaactcagtatcccgcatccgatcccataggctactgccagaagaatgattcccatcatcagcttcacacacgtttttatgggcgaaaatgcacgctgtttttccttctgttcacgggataacaattcataaacctcttttttccaaagcttgatgcaaagcacaaaccgggcaagcattttaattccgcaaatcccaatgaccgtccacaatgcagccaaaccggaaaatgtaaactgatgacgcagaattccaaatcctgcaagcttcgccgtaatcaggcttgtaagttccgagatcagcagagcccccgggatcccgatcacaagagcatacacaatatttcgcagatcttccagaaaaagcatttgaaacagacttcttttcttcatgccaagcatcaaataggttccaaactcatgacttcgccgttccatctgatacttatccgtaaaatataccaggaaataaagcaggcacagagataccacatataaaatcggaatcagcatcagcagcttgtttacagcatctctctccatctctttcagaaagatcatcacatcctgatgatccagcgcaaggataatataaaatgccgccaccgtgagaatcatcgtaacaaaatacagcgtgttttcctgccggtttcgtttactgtttcgtctgatcagttcagagaacataattgcttcctcctcccaactgcgccatcacggacaaaatgcgctcataaaattcccggtttgtctcctccccgactcgcttccgtaattcatgaaatacttttccatcctgaataaacaaaattctggaacaaaaactcgcagcctgtgcgtcatgtgtcaccatcagaaccgcagcctcatcctctcgattcactccggagagttgctccatcagacttcgtgcacttcggctgtcaagcgcaccggtcggctcatctgccagtacgatctgcggatgcaaaagaagcgctcttaatgcggctaccctctgcttctgtcctccggacatctgattcgaaaacttttccagcacctcctcgatctcaaaatattccgccagcttctgcatcctttttctgctttccttttccggcattttgtgaatctgtgccggcaaaagaatattttctccacccgtcagattatccagcaattcaaactgctgaaacagatacccgatctgtcttccccgatacgctgccagctgagtatccgtatacattccgatatcctgtcctttcagaagaatcctcccccttgtaggtcttaaaaccgaagcaatacaatttaacagcgtcgtttttcccgaaccgctgcttcccataattccgaggaattctccctgatatacttgaaacgaaattcctctgagtgcctctgctgcattttccttttccccatatgttttgtacaacgattctatttccaaaataatacggctcataatatccctccctttcgtgataagaatattataagccgtatcgtggatgaaaaacacttacactttctgtaagaaaactccatcctctttatggtctgctattcacagtaaatttttatgaaagctccagttttccggtatataactggtaatacgttcctttcattttgatcagatccgcatgatctccacgctcgatgatctttccgtgttccagaacaataatcgcatcactgttgcggattgtagaaagtctgtgcgcgataacaaatactgtacgtcccttcatcaggttatccatacccttctgcacaatactctccgtacgggtatcaatgctggaagttgcttcatccagaatcagtaccggcggatttgcaactgctgctctcgcaatggaaagaagctgtctctgtccctgtgaaagctcttctccatcaccgcttaacatagtatcgtatcccttcggaagcattttgataaactgatctgcatgagccagttttgcagcctcatatacttcctcatcagtagcatccagttttccataacggatattatccataatggttcctgtaaacaaatgggtatcctgcagtacaattccgagggaacgtctcagatcatcctttttaatctttgtaatattgattccgtcataccggatctttccttcctgaatatcgtaaaagcgattgatcaggttcgtgatggttgtttttcctgctccggtagaaccgacaaatgccagcttctgtcccggttttgcaaacagactgatatcttttaagatcactttatcttcgttgtatccaaatgtcacatcttcaaaacgcacatctccggtcagttctgtataagacacacttccgtcagccgaatgtggatgcttccaggcccacattcctgttctttctttgcattcgataatattgccgttctcgtcttttttcgcattgaccagtgttacgtatccctcgtctttttccgattcttcatcgatcagagcaaaaatacgctctgctccggcaagtgccataacaatggagttaaactgctgcgccacctgcataaacggctgtgtaaagctctttgtaaactgcagataagatgccataactcccagagtgatccctccgattcccataatagaaaggaatcctccaagtacagagaccagtacaaactgcaggtttccgatgtttccgattaccggtcccatcatatttgcaaaggtatttgcctgtgcagcactttcaaagagcgcctcgttgagtttgtcaaattcttcttctgactttctttcgtggttgaacacttttactacgcgctgtccgttcattctctcttccacaaatccagtcacatctgccagagatttctgctgacgaacaaaatattttccactgtttccaccgatcttttttgttacgaagatcataagaccaatgatcagaactgctaaaattgtaagcagcggacttaagatcagcattgaaataaaggttacgataatcgtaaaaaaggacatcagtgcctgtgggatcgactgactgatcatctgtctgagcgtatctgtatcattcgtgtaaagactcatgatagaaccattcgtattctggtcaaaataacggattggaagagtctgcatatgttcaaacatatcgtcccttacttttttaaggacaccctgaccaatgtagaccatcagtcgtgtataagtaaatgtagcaatgactcccatcaggaaaatgcttccaagcaccgcaagtgcccgatatagttctgcaaaattcggatctttctgtccgatcagaggactgataaaatcatcgattaaaaacttgagggacaatgataccgaaattgatgcgatcgaacttaacaaaatacagataaatacgatcacaaaccgaaccttgtacgtcccggtcacatattttaaaagccgctttgcggtctgtaaattttcttttgaaacctttggttttctattcatcgtcctcacctccctttatctgagattcatatacttctctgtagatttcatttgtcgcaagcaattcttcggatgtgccgactcccatgatctttccttcatccagtacaatgatctggtctgcattttctatagaagaaactcgctgcgcaatgatgatctttgtagtatccggaatttcttcccggaatgcttttcgaatcagcgcatctgtttttgtatctaccgcacttgtggagtcatccagaatcaggatcttcggttttttcagaagtgcccgtgcaatacacagacgctgcttctgtccgccggaaacattgtttccgccctgtacgatcatcgtatgataacctgccggaaattcttttatgaagccatctgcctgtgcaagtttgcagactctctgaacctcttcctcactggcatgttcatttccccaacggatattatcgtagatcgttcctgtaaagagaacgtttttttgcaataccatagatacctgatcgcgcagtgcctccagattatactctctgacatccagtccgccgacttttacagttccttttgtcacgtcataaagtctcgggatcagctgtaccaatgttgatttcgcacttccagttcctccgatgatcccgatcgtctgtccggatttaatatgaagattgacatcttttaacgaaagatttccgccttctcccgcataactgaaatctacatgctcaaaccggatctctccgtctgccacttctgtaaccgcattctttttgtcctgcatctccggaacttccgccagaacttccgtaatacggtctgtagacgcttctgcgatcatgatcataacaaatacgaatgtaaccatcatcagagccatcatgatctggaacgcatacacaatcacactggtcatttctccgatttccatcgcaccgaatacaatttctcttcctccgatcgctaccatcagaagcatcgccgtatagatcgtaaactgcataaccggtgagttccatgccacgatcttttctgcttttgtaaataatgtatagacatattttgaaattccatggaatttttcaatttcgtgatcttcccgtacaaaggcttttaccacgcgggatgcattgacattttcctgtacggaattattcagaatatcatactcatcaaatactttaataaaatgcggatgcgctttctttgcaataaagatcagtgttcctccaagcagcggtatgatgatcaggaacagtaaagcaattttcttattgagcaaaagtgtcatgatccaggataaaacaatcatgatcggagctctcgccagcagacgaatgctcatcatatacgccatctgtacgttagtaatatctgttgtcatacgtgttacaagaccggatgtggaaaaccggtcaatatttttaaatgaaaattcctgaactttataaaaaatatcatgtctcaggtttttggcatatcctgcacctgctattgctgccatttttcctgctataataccgaaatacagagccagcattgccataatgaccagaatcaatccccgccgtacgatatagctcaaatttccctgcatgattccaacatcaatgatcttcgccatctccatcggaatcagaacttccattaaaacttccaggattacgaaaaatggagccaacacagactgctttttgtattcccggactgattttaaaagtgttttattcatcgttctcgtcttcctccttattttctgttttgttttctgcaagattttgaatcatctgcacaagcacctttctgcagatctttacatcttcctgatctattccttgtatcagccgcttttcggtatctctgatgtgctccagaatctcaggtctgagtgcttctgcttttggggtcggtacaatacgttttaatctggcatcctttttcgaactttcccgggaaataaatccatttttttccatgagctgcaaaatccctgtggctgtggacttccggattcgaaactcttcttctatatctttctgatatacttccctgtgcatcgtttccaaaagaatatgctttaacacatgcttctgcatggtggtcaggccatcatctcccactgcttcagacgcatttctgcgcttcatctgattggaaagaatgtgaatcagcctgccggtattgatgtacctttccttatcttctatatcctgcataattccatccctctctctttatatagttagttccctaactttcaaccattatacggaggatattttttattgtcaagaagttttttcagattattgaaatcataaaacttattttgccacgtctgaatattgcctgatggcagcaggcagcccggtacggaaaataacagaaatataatcgctcgtctgctgcctgtcatacttttctttgttcacgatccattccagtaatgtctccgcaattgcctctgtataaaagaatctttttaagtcctttgtaaccttaccaacatcaatgtggcagagcgtatccgtgaactctcaaccattaaggttctcggattctacgacaaagaagtaacactctatatttaccgggaaacaatactcctttccctgctcggtattttagcaggatttggagtcggtgatctgctttaccagtacatactggcagttgttccaccggatgaagtgatgtttaaccccgctctttgtgcaaaagcatttgtgattcctgccattttgattgcagtcattacatttattctaggatacataatgaatcgaaaactcaaatacttagatatgctcagcgcattaaaatctgtagaatagcaaaaaatttaaaagtcaagggactgacacaatgcagctccttgacttatttcatctgtacttgctatctttctcttaatttccacattcaatgctgatcgcattgaatttttccaggatatcttccacttttaatgtttgtttttcttcagctgacaagtccatcactgcctctccctgatgcatcatcagaagacgatttccatattctactgcatagcggagattatgtgtcaccatgatcgttgtcaggtttttctgtttcacgatcttatctgtcagttccatgatcagatctgccgtctttggatccagcgccgctgtgtgctcatccaggatcagaaaatcgatcggtgtcatggttgacatcagaagtgccattgcctgacgctgcccgccggagagagaaccgacttttacattcagcttattttccagtcccagattcaactggcttaatagctcctgataatgagactttctgtttttattaattccttttctcaatccgtaaaaactgcctttgttgtctgcaagagacatattttccagaattgtcatggaaggacaggttccaagcgccggattctgatacactcttccgatcttccggtttcttttatactctttcatgcgggaaatatcttccccatgcatcagaatctgtcctgcttctaccggaatactgccgcacaggatattaagcatggaagtctttccggagccgttgcttcctaccacagaaacaaaatctccctgttctactgtcagattaaaatcttcaaacagacacatttcattgactgttcctggattataatatttatgaatatgttttaactcaagcatttgtcttcaccttctttttccgttccattccaatgagtaagatcgcgaggaataataccgctgtgatcagcttcatatcctgtggttcaaaaaacttcaaagcaactgccacgcaggctttgtaaacgacagaaccgatcagaactgctgtggttgctttcaaaaatgtcagattcttaaacaggctggttccgatgatcacgcttgccagcccgatcacgatagctcctgtaccgctggaaatctcaaatactctctgctcctgacagaaaattccgcctgccatagcaaccattccgttggcgatcgccagtcctaaaatctttacatttccctgatcctttgcaagggaagtcacaagatttgcattatctcccacagccctcagaagaaatccggattttgtctgcagatacagatccagaattattttcacgatcactgcaagaataagtactactgcaagaactttatatttcgctgccccgcctgagaaaatcccattcattgtctcattgtcgaaaatattctcttccccaaaaatcggaacatttgctttccctgcaatcctgagattgatcgtccacagcgcagtcatcataatgataccggagaggagatccctgacctttcctttgacatggatcaatcctgtacagattccggctgctgctcctgccagaaaagagaccggtatggtcaggtacggattcactccctgtgtgatcattgtcgccgtcactgcagcccccagcggaaaacttccatccactgtcagatccggaaaatccagaattttatatgtgatataaactccaagagcaaggattccgtaaatcagtccctgttccaaaatcgttacaaaaatgtccatctcaattcctctccgtttctactttttactttgaaatactgtcaaacgtttccgctgcaccttcaagcagtgtctcgtctaccgtaactcccagttcttctgctgcctttgtattgatataaagtccaggttcagaaatcgtctcatagttcatctcagacgccgtcttctctccttttaaaatctctgctgccatctttccggtctgttttccaagcgccacataatccaacccctctgctgccagacatcccagtttcacctgttcaatctcgcttccaaacaccgggattttcttttcattggctttgtcaagaatcgttgccagagaatttacaaccgtattgtccgtcagatttgtcagacagtccacctcggataaaatctcttctgttgccagcgaaatatctgctgtctgcgtcacaccttttttcacaatcgtaaatccgtaatctcctgccagctcttcatatttctcaattgctgatacagagttcacttcacttgttgtatagaggatcccgatcttctccgcatccggcagcatctcgcggatcatctccagctgctctttgatcggaagctcatcactggttcctgtgacctctcccaccggagctccatcgtcatttgcaagctttgctgcttttggatctgtcactgctgtatagattaccggaatctctgtattcattgctgaattgtatgccgcctgcgcgcttggagtggcgattccacagatcagatccacatcgtctgaaacaaatccatcactgatctgctttgctgttccctgatcggccgccgcattctcctctttgatcgtaagattctttccttcctcaaatccggcttctttgagtccttcaataaatccctctctgcagttgtccaaagaggcatgctctgcaaactgggaaatccctactgtatatgttttggtaccatcttttgtctcattttcctttgttccacatgccatcaggctgactgccattacacttcctaaaataactgcgaatactctctttttcataatttggttctccttttctattactatattccaaaagcaaaggagccgatcatgtggatacagggtggatgctctgcaatgatcgtataaaaaaaccgccccaagctatatgcttgagacggtaataaatacaaattcattatcgcggtaccactcaaattgacaaatgtccactttctcacgtactgacatacgctcctgattgataacgggttcggttcccgacgacgcctactcttttcatttcaggccgccctcgaaagtccattcagaattaaaatccatacagcaatctcaccgcctgctgctctctgtgatctcttttaaaacctactcttctttctcatcggttttgcttttgatgtttttaattgtaatgtcctatttaggatttgtcaagtacttttttaaggtaaagtggtgatttgatgaatttcccttattcaatttttaaaacaacctccggataccattccattgctttcctgattgctttcttcgttggcagtccatatcctgataaaataaccagtatatttttctgcgtttcttttttctcactacacggttcgatatacaacatatttcctacagcattgaccagataccacgtgtcttccagatatacaaagcccttgattcgaaatgtatccactaaaagcatattcagaaaatgagaaagtgtttctaattttatctcttcttgaatgtgcagaagatattttcgcaaagtcacatctgcagtttgcaacagctgttcttctgtttccagatttggcttttgcatctcctgcagccacctctcttccatcatgccatatgatgtcatatgcaacggcaaatccggtcgatgggccttcagaatcttttgaatctgctctatctcttctgtttttacaagatccttcttgttcagaagcagcagatctgatacctgaatctgtttttttactacaactgccgtttcatacactttcggaaattgccgtgcatccagcaggcagacgcatcccatatattccaatcctggaaatttttccctctgattcaatattttcttaacatttgtgggatcggagagccctgatgcttctactataatcacatccggcttctcctgtaatacctgctgcaatacattctcaaatttatccagcctgcacgagcaaaagatcgagccattgttgatctcgtccagtgcaatccccaactccgaaagcagttctccatcaatgccctcttttccaaactcgttcacaataatatgcatccgttccgaagagaattgtttcataaactgttttaaaaatgttgtctttcctgcacccagaaacccggtgatcaaatacagtctactcattatttcattgccgcacggatcgcgccttccaattcttctttagatggtaccagagaacggaatttcaattcaccattgatgtacatggacggcagattcggaacgcccatctttttacatcttgcgatattctctttgagcgtaaatttatactctaccatatcaatcgcatcaccaaatgtctttttcgcttcatttgctgcgcccatcatgtaggtacatgccgcacatgtcgcagaatccagagtaaatacctctaccagtggtttttctaagtgctcataatccggaagctctacttcaatatcttcgtcttctgccacatagttctttaacatttctcttacagaatctgtctcataaactgcctgtgcaactccgattgcattttccacaggaacatcataaggcatatcgcatccgggtgctaaaataaagtttttacagcctttcattttatcaagcaattctaccgcaatccacagttaccggaacaaggctcactgtttaatccaatctgcgcgaaaatgtatcctttgtctccatactcttttctggaaagttcatttgctttcgcaatcagctcataaaatactttcgactgattgtctatattcagcaatgtcactgcatcctcttttgtcagcattccttctgcatctacttttgaaagtatacttgctatatctttcatcaaaatacctccttgtgtatttctatcccacatattgctataaacatagtagtatatttcaaacaaaatctatgggaattttttaagattttctgtaatttttctacatctttattgattcattctgcaatcttccgctctttcaactaaaatggaatccctctccgaagcagaatctgtcgtaaaaacattcctgcagcattaaacccagcggtactatatcatccgatgtaaatattgcatccacaccaaatcctttttatgcttcctataaatccacttatattctgaatcatcgtcaggagttagaatataaatagtacaagccaaaagagaaatcccaaaatacacataagcatggtacaatagagacatgctgaaggaggatctcatatggcaagacaacatgacaaacagtttaaacttgatgcaatccagtactacgaagatcataaggatttaggtgtacgtggatgtgcgaaaaatctcggaatcggatacagcactttaacaaagtggctgaaagatttccgggaatctggcgatatctctgttcgtggttccggtaattatgcttctgatgaacagaaagaaatcgctcgtctcagacgtaaattacgtgacgcccaagatgcgcttgatgtattaaaaaaagccatcaacattctgggaaaatgacagaagccatttatctcgaagtttctgagaagacggaagctgccaagaatgctggacgccgggtttccgtctccggaatgttgaaatttttaggtgtctctcgttcaggatatcatgcatggctccaccgcgtgccttctgatacagaaaaacgtcgtgaaactgtaaaaaccaaaatataggatatttatgatgattctaaacagaactatggtgctccgaaaatcactgtagagctgcataaaaccggtgaagttatttcggaaagaacggttggcacctatatgcgcccaatgggaatccgcgcccaatggaacaaaccatggacgatcaccacaaaagattctgatttcagcacagaattagaaaatatccttgatgaacagtttcatcctgatcgcccgaatgctgtttggtgttcggatatcacctacatctggacaatagacggatttgtctatctgaccagtattatggatttattttccagaaagatcattgcctgtacactttcagaaacattggaggtatatgctactgtcaggatataaatgatttcatatcagaagtgggaatatgatatgttcaaacaccattttaaaagatctttttccatcgaactggatgaccagaattgttttccaaatgaaaaggattttgtttatccaaactctctggtcatacaggccgcactggaaaattactgcctgaaaaacggaatccacctggagtatatcagtaagtataaaccaatcacttttatattggatggaaaaacaaaatatactgccgaagcacaacttatccgcggacgattttattctggatacactttgatctgtacagagatattagaagatacagaaacataaaaaataaaggaagttaccataaacctctccgttttatagtaatctcctttatttatcgggttctatgaaggttaataatctctccggctcttctattccagaaattcagaacttgtacttctcttgataatagcgtccggtattctgcgttttcttatcatattgtatagctgcaaccggacaggcctgtatacaagatacacaggccatacagttctgtttccatacaggtttttatctacaagtgtgatattattatttacacagatttttgcacatttcccgcatccaatgcatgcatccgtaacataaaatttctttgccttcatttgataaaagaaatctgtcataggtgcgccgatgtctgtcatcaatggaaaggcttttttatctggcagtaaaggtgttccagctgaaatcaattctgcgatttgttccaccttgggcatggcctctcgaataatattctcattctcctccggcgagagcattttgtgcatcataatattgcactgtgacatcaccagaaaattaaagcccataaacttccagcctttctttctgcacaggttcttagaaaaacgttcactatcccaagggcgtccattacaagctccccacaaaatatgctttcgtacaccccgtaaattctgtattcatgatatgctcataaacaattcggggaggtctaccactatacacaggcatcacaaatacaactctttcatttacggatacttgttctgtacatccatctttaatacgccgattcatagaaacagggatttcgcccatccattctcctctgtttgcaatcatccaactatttcctgtaccactataatataaaatcatatctcaccactcctgtccggaagctggttcattacttcctgaatttttgtaaacaaatcaatcatactttgcatacagttactatccaaatcaatataataataaatgaaagagccttctttgcgagatttcacaacaccggcattcttcaatatctggatatggtgagaaacagcggctctggataatttcattctgtctgcaatatctacaacccgccttccccgacaatctcccaacacctgtagcagaaggtactgccgcgtctcatccccgattgccgtaagcatattctgacagcttttaaactgctccttcatcatttctatatcaatattgttaagttccaatactattcactttatctttgtatctaaatactcgaatgcttctgattataacacagcaaacgctcttcggattgcctgtaaagaaaatcaagacaggttttttgacttttctcttttagagactgtaaaatgtaaccttgcagaattgatacagatgtgctatattgaggatgtaaaaagggaaaccgcaagcggcttaccccgaacaatgatttactaccctaacgggcagccgtcacatgtgcaagatgtggcggctattttcgtttatccttgaaaatctcataacaaagactaacaagggcaacaatgaatattaacaactgaatcagatcagtatatgtaacacacattggcatcgccctcctttctttcgtctggagggttgcccctccgtaaaagagggtaagccgcccggctttggtttcccatgccgagattatagcatattgtcaacctgctttcaattgtcggctgccgctttgcagatttttgtatagcacaatgcacagacaaagttaaatgctcagctcaatcagaccatacaggaactgaaggcgcaacttaacaagaattccaaaaacagttccaaaccaggcagaacgtgaccttcgaatgataaaggtaaaagcgaaagtatccggatgtttccgaatcgaagaaggagctagggattatctaaaaatcatgtcctatgttggcacagcacataagcagggatgcaatgcttatgaagcaatcagaaatgcaatctcaggtcattttgattttatctttgaataagggtggttctgaatagatacattgtaggtaaattgtgcagcggtgaggaataaatatttttcgcaataaaatacccagatttcatgcagaataatctccagtgcggtaaaatataagaaacaaatttttcgcacaggagattttgagacgaagaaacgacaaaaaagagaacgcaagaaacaagatcgtggaattgttgattttatgatggtgacaaatcatttctttcattcactaagagaatggattttagaaatggaagatccgagaaatcagagttatatcacctatacacaggctgatcttgcatatatgggaattctaaaaaatatatgcggtcagtatagcatgagggagatggacgaaagctttaacgatgaaaattgtattgccactttgcagattttatccgggaatcggagtttggaagaaatgccgcactatgataccttgaattattatctggaaaaactgtcaccagagtgtctttcagagttaagaaagaagatggtcaaaagtttaataaaagggaaacagttcaatatttagcacaggtggtgatagaatggaagatgaaatagctaaataatgcaccctattttttggaattggcgaagtagacctataagaggtgaataacttttagatattttaggccacttataaatgattttctacgcaaaatggcaaaatttcggcatcaggaaaatcaagatgtaagcgccggattttccttgtatcccgaatgtcatgtattcccctttgctgatggcttccagtacagacagatcacgggaatcaaaaaagttgaatccgcgataggttcgttccttttccctccgggaatgactgacttcatccaatttcttccggccgctgctgtgatcatcaaaggatgagataaattcaagatatctgtaattcgcagtacacagccaaacttgtcatacatttttatggacacatcacccatgtggtgcttgatcctcgttccgaggatgcgctgattatagtttgtgccaatctctttggtacagttataagtgattcgctgtccaaggaaagtggcgatgttgtcaggcttcacagtatatatcgcagtgtggatgatttcatcatagattggtgccaggtattccggcttacggaacatgatatccgtggcacattcgatctgctgaaccgtccaggtataacccagcccgagagattccggaacgggactgtagcgtctggcaaagacatcgagaactttatggagcccttgcgggttgatacggtcagaaagtttctgagcagtttcaatatcggagatttcaaggaacgcgttgtcctgcatccggtaagaaagctgttttttatcaagcttataggcgagcaggttatgaccgttcatgtaaaactgaagacggaaaggcggccatgtagggacacgaagatagcaaaggccaagttccctgtcgataaaatagaaatagtaatgaagacacttgctctggtcaaacttcaggaaggtcttcccagttgttttatcatgccagggcctgtaggtattacagcattccatagcagaaaagatatggatcagaccttccgtttttccggtttcggcaatgatgttctggatgcggtcatcttttcgaaaagcatggagttttcggatgaactcaatttccattccattttcgtgagcaatcttttccgcattctgacggacctgttccgtaaggggctgggagaaactggtgggataatcaaaaatacggataccgttgagtttcatataggcagtcattgcttccgcatggctccagtttgggatatatccctgaatgatcatgcggtcataacaggtaatgatgccatgaattttatcagcgtatttatcagtgagtaacatataaaaatcccctttttctttagaataacacaagggatagaaaataaaaataacttttccggtttatccgggttagggactgtaaaatgtaacctattatcttgcagaattgatacagatgtgctatattgaagatataaaaagggaaaccgcaagcggcttaccccgaaaatttagaaactgtttttacaaacagccgtcattattcgcagtaatggcggctattttcgtttatccttgaaaatctcataacaaagactaacaagggcaacaatgaatattaacaactgaatcagatcagtatatgtaacacacattggcatcgccctcctttctttcgtctggagggtcgcccctccgtaaaagagggtaagccgcccggctttggtttcccatgccgagattatagcatattctcaacttgctttcaattcctctgctgccaatgcatcccattttctaacggtctgtatttactgtagtatttcaatgaaaaatcaattttacccctttaccctaacattttcctcactgaatagatttaaactataatttcctctatcctgtatggagttttaaagcgcagaattgattttatgataacttcttgagccgttctgcaatttctttccgctgttcttctgttaattctcgcttaatatctcttgaccgaattgtaacgaatctttttgaaaagaaatattctttagacacaatagtacccttcacccgttccactctttctaatctgaattgctctggattctgttgcaatagctgaatcagacggacgtgcagggccagggggatctgggaatacgggaccatggatgaaagcagtaatgcatgggtatgtccgcagattttgcagtacacacgaacaacggaaagggagaggatcctgtcagcaagctggatgctgcgtttataagagccatgacggatgagacagccggagtgaccgcagacacatgaaataaggttcagatcaagggaatctattgctttattgtaaaaatcctgagaaatacggttgtagttttctgttttaactgttatcataggtatgtatgaatgtagcgagagctatgtttaggtgaaggcagaaactaaactttggtaggggaggtttctgctttcttaatttcatggttacaaaaccatatgataacacaagaggtctcaggataaaacaatttgatggaaaatacgtcagattcctttattccaagacctcttttattacgccttaaagatgaaaaataagtttgttatagtgtgcttgataataatatacttcccttcttcgttctggaacgtcatgcaaagagcttctcccttttctccggtctcccggtcttttgtcatgcaatcttccagatcgatcaaaacgcactgtctcaactcttccatgtcctctgatccatataccggatgttctacaacattctctgacttcgctttctccattccaagccggaaggctttctggattgcttcgtactgatccacgctttctgcattgatctgcatgatttcttccgctgccatttctggcaacagtccatcttcttccagtgatgcatactctccgatcagcttctgtataccgctcatagctaccactaacgaactcagcacgctccgctctgtttcttgatgctcttctcttgtcatagtgccgttgccgtatccgttgatcccggttgacatctggtactgcgcatattccagactgtttaaaatattctgtaactgtgcttctgtttctgtcatttcaaaaaataatttgctcatactttgttttcctcctacgcttctaacatttgaattcgatacattggaactgacgcaaggatgccgccctttaaaactacaattcccgatgtttcccgaaactctatcagttccccttccacctcatggaatgtttcttcattctccccaactcgttcccctgcatctgccaaaatggatacccattctttcttgaacagtagtctgctctgcttcatgtttcgctttcctttccaattcgtttgcaagtgccagtgctaattctttcgagaactctgtctggtacttcctgtaaaatctgtcggtatcttctactactttctcccagtattcctttgtgttctctacgctccagactgattgcatcattttccaatagtcctaaaacatttcaaattcttcactgccttttaataattttacgctgcccatcttttaatcaaacggtgtcggtgtccgtaccgtcttgaatccatctttgcttttgagttcctcttctgtttcctggaatcgcatttcatttccatcaaagcggtatacaatcttccctagttctccctgccggttcttatccactttcagacctttcctggtcttatcctcattgtccagattccacaacaaaatgataatgcttgcatcctgttcaatgtctccggcttctgatacttgcaatgaccgcatggcgcaaagaagacgccgagctaaagctaaacaaaataaatgaaagcactccccggatcgagtgcttttattctcattgtgggtaaattgtgggtacagcttgatttttacgcttgtctgtgctacaattccacctgctgaaagtggcgtatttaaggcatttccagcaatcaactatcgtgtgttcgagaccttccacacgtaaaataaaactaaaggagattttgatctatgaaaaaagaaaaaacaatcagcgtactgtttctggtacagtcagcaatgatcgctgcaatttatgtggtcctgaccatcgtatttgccccgatcagtttcggacagattcagtttcgtatcgcagaagcactgaccatcctgcccgccttcactccggctgcaattcccggactctttgtgggatgtctgatcggaaatattttaggaggcgcaattcttcctgacattattgtcggaagcatggcaactctgctcggtgctattttcacctatcttctgagaaaccgcagcaaatggctcgcaccactgccgccgattattgcaaatacagttctgattccatttgttctttattatggatatcagattttgcttccaattccattccagatgcttaccgtgggaattggtgaagttctctcatgtggaatattgggtatgattgtctacaccgctctgaataaatataagacagttattttccgtcagtaacaaaaaggaagaagttctttcacagagaataaattctctcaaagacttcttcctttttctgttatttcatataaccgataaacgtgtttccacttcctgctatcatagcgctcatctgttcaatcgaaactgtattttgggatgctgtatttggatcgatgtaagtgatatccgtcatactatatcctgtcagcaggatcgcatgattggcatctgtcatcgcaatgaccggaaggcccttgttgataatatacagaacctgttccagactacatccggtcaggtctacttttttggcattatacgctgccatcacctcttcacaggtctgaagagaggtctttccttctccatttccaaacggtgctgtctctgtatcataaaccagatctctgttgcctttttcccatacatatgcctgttctgatgagattactactcccgaaatctgctctgctctctgaattgcataagccgccttatcgtaaatcgcaaccagttctcccattccatatacatagtacttttcagacttcgacttgtcattcagcgtgatcgtgatcggctttttccccaccacctgcttcggacgcaggattttaggaacagtatcggaaattcctttttcataagtcagccgcatctgcttttcttttaaatctgtactgaaagcttccagagttatactttttgtcttcttttcttcgttactgctgatataatcctgactggtaactgtataagtctctcctgattttacaaccctgttcagagtcatcatattttcttcaataaatacatcggatatataaatctgatctgctgagtatgtcttcatcacttcattttctgaatttctaatctccagctcatacatcgggaacagttcccctcccgctgccgtatgaccgacatcttcctgccgcagatatccatacacaaaatctgatccgataaatccaagcggtctgattgcttcccctgattttgcggctacagcattttcttcatctgttttcagattcaataccttgatttcctgtgcggtattgatcgttcctgacgtctggtatgcgatcaaatgcccgtctgcagacaccgtatactgcccttcttccagattttttgccaacactgtctgctcatcttttgtcagatctatcttgtaaaactttccgcctgccagaatatacaaaagattctgatcctgattgtaatacaccatttttccaagctcttcctctgcgattgcaaatgattttgtacttggaataaacgctttttcctgtactacatttttttcaatatcataatagtaaatatcaactccgacttctccctcatgtgctccgcgattcatatacccataaactgcaaacgcagtacttccattcttttccacactgatgatccggatattatgctggtcatacctgctccgagcatcatttccttcaatattgctaaaactgaatacctgtgcaagctcattctgctttgcattgtatgtccataaatttccatttctcacaaaagaaacaatatttcctgacgaatttgtttcatacgatatatcggatgatgctataccaagaagaattccgttctgatccagcactttctggtttgcatcaaaaatctgttccatcttccgattataatccaaaaggtagatttccccctgcacgtagcgaatcctgaaaaactcgcggacatcatacgtctcgatctctcccgtatctccggcacatgtcacctgatactgtgcaagcagcgacgtatagacggaattgctctctttgatgctccactccggttcctcaaccacctgcggacttaaatttccccatgtcacatgatctgcatcagaatggatggtaacagtctggtaagttgtattgtccccttctgcattcgtttcaagatagttttccaattcctcctgactgcttttttccagtgtctttgcatgaaaatcctgggcaaaatccagacattcttttaaagaaagttcatccggtcttgtaattctggtataaaagtgaacctgttcctcttccatagaaagaatcacttccagaacagcttctgaaacttcatccggaagacctttttgcagatccagcaaaatcgtctcatcagaaatatccttctgtttgccttccagataggtttcctctccattcagcgaatacactttatattcaacacctgtgattttatttccaaactcttcaatctgcatctgaagtgttccgtttgcctccaatggtgtaatggtgtcccgcattgccgtaacatccatctcatttacataaccggccagagcattcacagtcctgccttccttttgaaatgagattctcggaagtgtaggatctcctagatcgatgatctgatcgtctacaccactgttcataaacagactgctgacaaaaattgctgccacaaatactacaaggagtattcctgcctttcttattctttttttcatgattctgtccccttatctaataacaatcctagcatcggctggattcccaaaaattccttgcatgcctgaatctgactttcactcccctgttttgcctgattcgtctttaccgcacgcagaagaatatttttcggcgtatgttccatatcgataaattccagaacctgagtctcataaccggactgctccagatatttcgctcgaagtccgtctgtcagaagcgccgcaaaccgctcttttaaaagaccataatccagaatcggcgccagcttatcatatccggctccttcccgttgcatctgcccattcaattcatgctgacagcatggaaccgacaggatgaccttcgcattccatcccaccgctttagcaagtgcaaaatctgtcgctgtatcacaggcatgaagcgtcacaaccatatccacttctctgacaccttcataatccgcgatatctccaaccaaaaattccagtttgtcatatccgtatttgcggcttaactcattacaatgatgaatgacatccgatttcagatctaacccgatgatacggatatcgtattccttcagaacatgcagataataatacatggcaaatgtcagatacgattttccacatccaaaatccagaatcgtgatctctctgtccttctcaagcttcggaagaatatcctcaataaattccaaaaaccggttgatctgacggaacttatcaaatctggaatgtacaatttttccatcctttgtcatcacacccagatcctggagaaacggaaccggaattccttcctctaaaatatatttcttacttctattatgtgacaattctaccggtcttacactgccttttgacgcttttttctgaatggttaccttgccttttttgctcactaaaacagtgtaattcatatgcactgtagatacctgcatctgccggaattcttccatatattccagcaatcggtctcgtgccgaaatcgggtccagattctcatgaaatgcctgtgtttttgtaaaagactccagttgaaaaagtaaattgccttttttctcgatcggccgaacctttacctttaaaattccttcttttttcctcggattgctcaaaactgcctgaacaaattctatatttaaaatatctgataataattttttgatcgtttccatgcgattccccttatcatttgttttctatataagctatgtgtgaacagtaactattgtaaaacaaaataaagtctcgtgcaataaaacaagtcttaaattaaaagaagacgggaaaaattcccgcctctcctactcttcttcagaattctctctgaaaaaacatgaatcttgttcttttttatctgcttttctaaaacgaactgtcgccttaaaaagatctccgtccagatacaattccagttttccgccctgcatctgtaccagacttttcgcaatcgataatcccagtccgcttccttcggtactccttgaaatatcaccgcgaataaaacgttctgtcagttcatctgctgagaaattgagcggatactccgaaacatttttcaaagaaaatatcacttcatccttatcagtgcgcagatctgcataaattctcgtccccggcattgcatacttcgccgcattattataaagattttccaatactctccacattcttcttccatctacatgaataatcgccggctcatttggaagtgtctgaatcagctccagattcttatgttcaaatttttctgcaaactctcccgtcgtctgattcatcatctctaccagattgacatccatcaactgcagattgatattcccgctgctcaccttggatgcttctacaacatcctctgtcaatgttttcagacgctgtgcttttgcctccaaaatttccagatacccctgtatcttaggatcttcaatattggatcgtttcaggatatccacgtaattgataatggaagttagcggtgttttgatatcatgagatacatttgtgatcagatccgttttcagacgctcgcttttcacgcttttttccacagccttctgcaatccggttccgatatcattcagcatttctgctacttcacgctgttctcctctgagatgttccagagaaatctgatattccagatctcctcctgcaactgctttgattccttttatgattttattctttgcaatcgcattcaataccagataatacacaatgaatgcatctgctgccagcgtgatcaacacaaatcccggcgttctgaataatgccagcatccagtggattccaatcagtatcacccctgatacaaccattctccacaccacatttctgtttctccagaatattctaaagaatctgcaaaacgcatacaatacgctgttcttccacatcgttcccgcttttatcctgcggaccaggctcagatatccgaccagggacatgatcatggtataagccgctgtacatgcaagttggatcatatcttgcattgtcggaacatatccggatgcatattcataagaatatccgatcgttgcagtcatcaaatccgtgctttctgcaaaatacccgagggccatattcccattattcatccagaacatcatcggaattatccagatcccaatcacaaacactgctgcaagctccgttttccatctgtcaaatgcattcaaatgcactccgtcacttcggttgtttcttccggcgatcactgtcagccatatcagactcacgattatcagtaatactgccgcaccgagcaggatcaccgcacgattgatataaggtgcatattcatcatataatttcttatccagataaaaagaatcctgtattgaaaacctggtatctactgccgctgcaaaaataaaatcaccgttgctgtttctgcgccgtgactttacaaactccttccagtcatttgctgtgatatccatattggtcttaaaatcagaaagctttggctgaacaatcatatacttcgcatttttctgaatatctgagatattttcttttacactgttgtaatcctgatattccttgcgatttgtataaactttttttgtttctttatcaacaaaaatataggcaaagtttgtatttccctctgtccattctgcactgttctgataagactggaaatcataataaagatttgacaggatgctgcccaattgtgcatacacttcactcagctttccattcagctgcggcgtctgatttacaacatccagaatattatttcctccatccggccgcgcctcttcttcaatggcaccactgaatccccagaaatcccggtacaccgtctcgcctttttcatccagaatatcatgtccggcaaatcgactgagactcacatcgccagaagccagtgcatttatgatttcatcagatgtatattcgtctatatccactgtcagcgttttctctttcagcagatttaaaaattcatcccaataatagtaatgataggttttatctgctttttgacagacaacaattggtttttcctgcgctgcatagttatgttgatactcctcactccatttctgaagatccgagagtttataccgcagtccttccatctcttcatcatagtgccttccgttatatccatactgcatgatatcgatcagcttatccggattgtattttccatctgtctcgtaaatatcttcataagaaatctgacctaaaacatccatcgtagcccggcacatctgattctcaaattctttggaatctgtatactctgtcggctttttattccagatttcttttacacttacagaatatgtggaaataatcaccagactcagcagtgccgtaattgccgaaagaacagaaagaaagatcaaaatgccttttacaagcgcacttttataccatttactcatgaaaaactcccttctataatttctcgatcttatatcctactccccataccactttcaaatatcgcggttcctttggattgatctcaatcttctcccggatatgacgaatatgtactgctaccgtattatccgctccgattgcatcttcattccagatggattcgtaaatctgattaatcgaaaatactcttccctgattcttcatcaaaagcaataaaatattgtattcaatcggagtaaggcgcaccatttctccgtctaccgttacttctttcagatcatcattaatccgaaggccgccaacctcataaatcgtctcctgcgtactactcacattcccgccaagctgtgtgtaacgacgaagctgagatttcactcttgcaaccagctccagtggattgaatggttttgtcatataatcatccgctccgatattcaaccccagaatcttatccgcatcttcagattttgccgataaaatgataattggaatactgttcgtttcacggatcttcaaagtcgccctgatcccgtccagacgcggcatcataacatccagaatcaaaagatgcaccgtttccgtctccagcatctttaatgcctgcatcccatcataagccttcagaacctgatacccttcctgtgtaagatatatttcaattgcttctactatttctttatcatcatcacaaactaaaatactatacattttcatcacctcctttacagtatacatgatattctcatttttttaagagccattggggaaaatcttaggaaattcttaattcgatttcatttctgtttgtaacaatgccgttataatccttatgaaaaacaatcactgctactctgcacatattcctcattttttcatataataaacataagaaacccatttttatattttatgaaaggattatataatgcaaataaaaggactggatgtcagcgaatttcaaggaaatgtagattgggaaaaggtcaaagccgcaggctatcagtttgccatgctccgtgccggctatggttttaacacgattgatccacaatttaaacgcaatgcctcagaatgtaaccggattggtctcccgatcggagtctattggttctgctatgccctgactccggagattgcacgccaggaagctgatggctgtctcaaagcaatctccggttatcgtctcgattatcctgtatgctacgatattgaacaggcatctataaactatgccgcacaaaacggagttactttcacaccggaaaccgtagggaaaattgtgcagaatttttgtgacagaatggaaaaaaacggatattttgcaatgtattacagcaaccggaatttcctcaaaacgtaccgtcttctgtcactttcttcaagatatgcactgtggtacgctttttataacagcaagctggataatacagactgccagatgtggcaattcacaagtcagggagagatcgccggaatatccggggacgttgatctggactatgtttttgttgattatccttctattataaaaaatgcaggactaaatcatttgtctcagaaaccgaaaccacccgccccgcaatataccacttatgtgatacgatccggagatacgctgagtgaaattgcccagcgatttggaacaactattgccactttgcaggcattaaacaacattcaaaatccaaatctgatctatgccgggaatacaatacggattccaaaatcctgacatgttttaagaatttcataagaatttttctatttctttaatagatttaacatactttggacacatttattccgtatactaatactcagatagttgataaacaactatctcccccctcataaagtaacggcatcttggggcgacccaagatgtcacactttactctcattcctttagataactataaaacaacgaaacccgttagccgaaaggttaacgggttttcgctgttcctgcatctccccaaaatgctttttggacaaattcggggcaaatttttctaaaagaatatctgttgattttattctttaaataatatcttcctataagttttgcaacttttccatttctgattttgctttgttgtctgtaagttgtattggcttattacaatctccttctgcatttgataatactaacataattttcatagctgccacttatatttcaaattatttgcatatatggattctgacaaaatatcttgtcatgcaaacaatgtgtttgataaaataagacgaggcactacatgagaatggtaggcggttagtccttcaacagggggactgaaccctctgattacatagaaatcttgcatgcaggaaatctgggaaaggagggcttgacttatgagcgattttgaaatgctctccatcgtactaatgatacttagtattattgtaacgattctgattgcatatattaatcaatcaaaaaagtaaccgcccctcagccaaaggattgcggttacttttttgtaacttattaaatctggactaaccaactatcagtagtgccttatttatatctataatataccacccgttaagcacattgtaaacatgtaactttgtaaatatgtaaacatttcaaactgttttcggactttttaacacattataatactatataaattagttcaatagtacctatttcctctttagataactatttttctttcatcaaaactgaagagtcagcgaaactgcctttgaatttgaactgtttagaaaccatgttccagacacatgaattgtcacacagacaatgtctgagagtttgatgtatttcctctatactacacgctttattatgtcccgcagaagttacttgatttctacgggacattctcttactttctggcaaaatgtatctgccgcaattcctctacatcatcgcagatcggatgcaacggacacagatcgcaatccagaataatatttttcaaaatatggtcaaatgcatttgtgatctcatccacctttttcccctgtgcgatgagctggtccatcaccggaagctcccgtgtgataaacagaatctggacatgctttgcctgaaattcttccttatatctctgaatcatcagattgccgaccgttgcaaaatccaatccttttttgactgcttttttactcactcgaacctgctctttttgatccatgctggacgacagcatcatatacccttccggaatgatcttaaattttgcaaattccagctttttgatccgctggtacgctttatcctggtcttcaatcggatctatctgaatccatgtgatcctggtaaacgggacactttttttgatttccggaagatccggtccatataaaaggatctgatcttccgaaatcagttcttttgaagaggtcactgcctgatagcaggtagaaggctgagaacggattcccagttcaaatgctacttctttttggagaagaaattcattctctttcagtaaattccatgattttgcatgatttctgttcaactcttttgccggaaaaggcttcagtaattctcttgtcttctcaataactttatcatatacctgcataactaaatgtgatcctctacttttttcgtctcatgataatgaagcagcttgtcataaataaattcgatcagcttggaatctgcattggtcatatagatggtaaacaaaaccgctgtcactgcactcacggcaagaaacacttttgcaaaaaatctgactgtttttttcatccggatcgccccttccttataagtctaatcccttttgtctcgcatattctgccgctccgagcgcacccatcagctgtggatcgatcttaagttctatgaccttcatacggagcaccttctcaatcgctgcttttaatccttgatttttcgcacatccgcccgtcagtgtgatcgcatctttcgctccggcttttttcgccattacaaaacagcgttttgcaactgcctgctgaattcctgccgcaatttcattctgcggttttccttctccgaccagtgtgataacctcagactctgcaaataccgtacactgtgccgtgatcggaatcacattttccgctgtaagactcagcttcgaaaattcttccagagacatctcgaacgcattcgccatggattcaaagaaacgccctgtaccggccgcacatttgtcattcatcgcaaatgttttcaccgttccgtccgtatcaaccgcaattccttttacatcctgtccgccgatatcaatgatcgcccgcaccgacggatctgtcacatgcacacccattgcatgacagctgatctcggaaatattttcatctgcctgcggtactttgtttcgcccgtatccggttccgatcagatacgtcagatcggaaatctccttcagaccggcatccgcgatcgcctgatccagccctgccttggcgctctgcgcactgttgatcttactcttgatcgtatttgctgcaacgattgccccgttttcatccaaaatcaccgttttcgtataggtcgaacctacatcacatcccccgaaatatttcatctttttccctccttaccaggtcagttcatcactgtaatccagataggtcggatccagtggttcttctctgaataccgttaacatatatttgttcactgcatcgcgcattgcttttctggacacagttctcggatccatcaggtcatgctgtacccagatcagatgaataccccgctctcttgcctgatcttcaaacaatccgtgaagaccgccaaagtttttgcaggaaacatgatcgtacatgatcacaatattcgcattaaatttctcacacattttccaacattcatccaatgcattgacatatccgccattgctgtgcgaacgcatcatcatccgctcgtatgccattgccatatctgtaagtgcttgttctttatctccgatgtgatagaaatgatagctcaacatactttccatatcgaccagtgtacggattccccatgtatgttctgcccaggtcgtaaaatgtgtataataatgtgccggacagcaccatacgatcgcacggtatttataatctcttctgtctgcttcccggtccttttcatatcctttgagcatcatctttgtcactttttcatcctgctttgtcataaacggatctagacaggccgcagtctggaattcatattccctctgcagggacagcgcacttcctatcacctgcggatatggggtacagtttacatcccatttatccagcatacactgcgttgtcttattatattcctctgccttttcccagaatgcatcccagtcccatttcacatggtaagtttcttcaataaaacggatacagtttttcagatcttttactgcataagcattcgtctccggttcattaaaccgctgcggcggggtcaacgtaaagctcggcagttttttcatatagcgatccataaacagagccgcgccgagagatccgtcacacggcatagaacttgtgataaaagaacttcctacctgcggataatcatccacgatcgcacatccaacttcagcggacggaagaggacacacatcagctgcaagccccatacgctctgctgcatctacgtacataatatttgcattctggtccacctctccaggcaggcagaccggtgacatggcaatatcgatccagtccagcatcggaaaacctgccataatgatcgacggggtcatctcgtcaaacatcaccgtctttgcacgtaattttgcagcccgtttattatttggtgaattgagattctcatctcgttcaatgatcttggcgatcacatctaccgagttatgtaccactccgtaaaactgttcctgcgtataacggagctgttttccgcgcagccccagcttatggcgatccagcatattcgccaccgtcagataagaagccatccacgggtaacgcacaaaagatttcgtcagagccaccggatgctttccaagtgtcactgccatatatccatataccttcagccaggaggcaaaatcatacgctgtatctcttacccctttccactccctctggttcagagaacggtacccttccgtatagtaatctccaagcccttcattatgcagctttacccttggttttgcataatgcctgacatcctttacaatccccggaagtgcttgtttcaacttctggatttttgttcctcgtctcattttccggcctcctctctgcgcgctttgatcttcttgatttccagactctccacaaatgcctgtacccgggttcgaagctgtccgcttgattttgcctgatacggccggtcaattgataaggtcggtatcttatattcttcggcaagaacatgactctgcagtgttctctcaaaagaccagtaggaacagaatttcatctgctcataaataataccgtctgcatgatattcctccaccagtttcgccgcctgatcctgtctgtacttgatcttatttggcgtgacatacctcggacaggaggtctgatcaatattgatccgcacaatctgagtgagcacatcctccgtatcatttaatacaatttcctgacggcccgggatcgatccatagcagaaccggtctgcggcaacataagcaccgctgtcttccaccagttggatcatatccggatcatcgatctctccgcccacgatcacaactcttgcacggaattttgattttttatccggctccctgtgtttgagttcctccagtgtttcatacaatttatccaggatcagatcttttggacagacataggttgcaagaacaatcttgtgaaattctgcgcctgtgatcaccggattttctgcttttcgcatttctcccatctcagaaatgatcctgcagatctcattatgcttctccacagcttttctcatcgccgcatcggatatatccgttccataccgttcatgcagcggttccagcacctttcttcgcagctgctctaccacatgctccaccgtgatctcttcatcttttcccggcacatccacatagctgataaagaaattctttttctctttcccctggatctccagcagttccatattttcgtaacaccggttcatgcattcacagatatcaaccccggcaatcgcatccagaaactgaaatccgccctcgatcgcccgttccagcaatgctctggaaaattcgcaggcactgcttgccagataatacgttgcaatctctgtagaacccatatacggagcccgtagtctgacagaaaaacagtgatccagattcagcagcacttccgggatatgaaaacaggtgtacccaacagcgacccggttctccttctgcgcttcccggaccagatcgttacaggcactgtccagtaacttttcaaaatagatcatatgttttagatctttcataacagccctcctgacacttacggcagaatgccgaacttctgcattgcatcccgcacattgactaccacaggtgattcttctggaagctccataatgctgcgtccttcaaaatcatacaatgccagttttttgtctgacgggatcgctgccaaaagctccagacctctggtatccagtctttcgatcatcgccgggtcctccacccggttcacgatcagaccgatgcggtcatatttcaccagctccattgcaacattttcaattgtcttgatgacttccaatccctttttgctggtatccgagatcaaaagcagatgggtcactttctccattacacggcggttgatctgctcaatgcctgcctctccgtcaatgaccacataatcaaactgctctgagatcatcgtgatcacttcttttaaatatgaattgatgcggcaataacatccggctgactccggacgtccgattgcaagaaacgcaaaaccttctttttcgacgattgcctctgcgatcttatacctggactcagacaacaattccattgcttcctttgtatttccatcctccacattcgcaacaatttcgtttcgaatgtcatccagcgtcagttccggctcaattcccagtgctgtagccagaccaatcgccggatctgcatcaatggcaaggatctttttctccggaaattcctcaaccagaagctttacaagagctgcggaaatagaagtttttcccacacccccttttccggtcaatgcaataatttttgtctctctgctcataccgtttttcctttcctttaaatccgcaccgcaaggtgatatgcaccacgcaccgcttccagtactcttcccgcacggctgctgtcaccgatgttgtacatttcttttgccagatgttcttcccctgcttcgaagaaaaaggtctcatccgcttttccgcccattgccaacacgatcagatctgccggaatctttttctcaacaatctcttccttgatcgtcttctccatcggattcggaatattcggaggaagcagtggctgccaggtattataaggatccggcacggtagaagactgattctgttctacataaacaccatctttggcaagtgctttgactttcgtacagttaaacagctgcacccctgctttttccagataatgcagtaaatgtcctctatttgcagtgcagactcccgtcataaaatgcggcatcatttccagaaccgtaacatgttttccatattcattcgccagccagtgcgccgtctcacagcctaccactccaccgcctacgatcaagatattttctgcaccttctgccttttccggatgctccaaaagctccgttccaaggatcagattcgcctcttccctgccttcaaacggagggaaaatttcctttgttccatacgcaaaaataacggaatcatatgctttttctttcaaaagttctgttgtcacagttgtattcctatgtacttccagctgatatcgctcctgacaaagctccatctgtttttcaagatatgcaagataattgcgcaggtcgaacttaatcttcggaatgcttccaactgcaatctttccgcctaatttctctgatttttcatacaacgtgacatggtgtccccgttttgctgcgatcagcgcaaaggtaactcctgctgggcctcctcctacaacggcaatctgtttctttttctcagccggtgtaaaggactcaggaaatcgttcttcaaaaccagttcttggattcacagcacactgtggatgaccacccaggataaactcgttaacgcagccttcctgacagccgatacacggtctgatttcttctacatttcctgcaaatgccttgctgcaccaatccggatctgcgagcagcggtcttgcaagcatcaccatatcgcagtctccatcccggattgctttctctgcaatatccggataccccagttttccgactgcaacaaccggcacatctactccggcattggatttgatattatttctgcggaaaaattccttcgcgattctggacatatcaaggaagcagccagcaggcattccctccggcggatgcggcagccaccagttgtcatagcagcccagatccacatcaaacagatccactcctgcacggaccagctttgccatataatgcagagtatccttgatcgttcttccatttttaaaccgcttcaaactgctgacttcattcatccgatcctgataggtctcattcaatgccagcgacaggtcgatccggtacatgatcgggaaggaatctcccgctctctttcgaatctcacggatgatatccaacccaaacatttcataatctttatagcgtcctatctgtcttctgttaaatgccggatttgtcatctgttccagcagatatccttcatgcccatgcagatagataccgtctaaccccatctcttttgcatctgctgccgcctgcccgcagttttttacaatttttttcaaattggcatctgtcagcggaatacatggaagctgcggaatataaaagctcggattcacggacgcagaaaccggaatcttatgttttgtcatcacacaagtcggtggtcctactcttccaagtcccggtgtaatctgaataaagattttacttccatacgcatgtactccctgtgcaagatctctccaacctgcaaacactgttctggcatgatcgattctcggaaacagtgacagatcatccacctctgtcaccgtcggatcgattccgtgactgaccggaatcagccctgttgtcaaaagccctgtccccccttttgcacgggcgaaaaagtactgaagcatcttgtcattgggacgtcctgactcttcacacatattcagattccccatcggtcccattaccacgcggtttttgatcatagtcttattcacctgaatcggagaaaacagggcctgatacggatacaattccttcgtcatctccccggagctcatcctgcagttttctttttcctgtttcacccaatccccataggtttcttccagtctgactaacttttcatcgcatttcaatgtttttgcacctcctgttttacgacatcttttacccaaactaattttgagcattttgcactaaaatcatatttcaattatatcatttcagtgcaaaacaaacaactcaaaaaaagacccgaaagggagtatatcacttccactttcaggtcttctctattatttatttacggatcatctccatatatggcagtacttcatatcctgcttttttatagacatgaactgctctttcattttcttcttccacttccaggcgaactaccacgtctgcgtatttttcttctatatattcaaaaaacttacttccgataccaagtcctctgctttctggcttcatatacagatcttcgatccagacacactgctttccaaactctgtggaaaagcttttggctgccatggcataccccaaaagctgcccttcattttcaaacacatatccttccagatatggactcccttctatgcatgttctgatatcattctcaaaaatctcatccgatccattactctgcactgcgggagatgcgtaaaatacccgcatcatatccaatacttcctgtttatcctgttccatcatatttctaattgtaaattccatcactgtccatccttttctttattctgccaatacgctcttatgccgtttcagatattttccgtctccttttttacctaagaactgattctctttcacgatcacatgccctctctgcatgaccagttcaatctcacctttcactgccatcccctcataacaggtataatctactgcactgtgcatatccgcatgtgtcagtatgcgctctttctccggatttaagagaatcagatccgcatctgaacccggcagcagagttcccttctgcggatataatccatacatccggctaggattcgtacacagataatgcaccatctgcggcagtgtaattctgcctttcatcacaccctcagagaacagaatgcgcatccgctcttcaactcccggtgcaccgtttggacaagctgtaaaatcctgcgctcctgcctgcttttctttcccaaagtgaaacgggcagtgatctgttgccacaacatcgatcacaccatcctttaatgcctgccataatgcatcctgatcctcttttttgcgaagcggcggagacatgatcgctttcagcccttccttgggatcttcatacatctcatccgtgagagtcagatattgcgtacaggtctccactgcaaaattcttctggtgggatgcccgcgctttcataacctccatcagcccttctttgctggacaaatgtacaatatacagcggtgcatcacctgccatggctgccagatgcagcagacggtccactgcctccgcctcacaacgcgccggtctgctgagcggatgatactttggctctgtacatcccgactcgcggtatgtcttcctaagataattgatcacaccatcattctcgcagtgcactgcgatcactatcccgtccttttttgcttctttgagtacctgaaaaatctcgtcatcagtcaacatgtcatcatatgtcgtatataccttaaaacttgtaattccatcattttcggcaatctctttcatctcccccagtatggatgcattgacatgctggatcaccccatgaaatccataatcaatgactgatttcccatctgccagacgatgatattcttccacctgatgccacaggctgcatcccttcgggccgaacgccatgtgatccacgatcgtcgttgttcctccacaggctgctgccaccgttccatcataaaaatcatccactgcacgatactttcctgactgcagatccatatgcgtatgtacgtccacaccccccgggatcacatatctgcctgtggcatcgatcacctcggcatcctcctcttccaaaactgttcctatggactttattttttcatcttcgatcagaatatccccctgaaatacctgcgactctgttgcgatcataccattttttactaataatttcataggactcctcctttttccggcatttctatctgttcatttgatatttatagaatactcttatcagcacatgaattcaacctgatttctgaaatattttcagatgtctaaatttcttttagcttctgttttctttttatgatataatgagcgttaacgaatcatgatatcatagaagacgattacacatttatcaggagaggatgtaaacaatgggatactctttagatctattaaaacaaattgcgcacggacttgcacagcagttcagtgattcctgcgaaatcgtgatccacgatgtacgccatggaatcgaaaacacaatcttatatattgaaaacggacatgtcactgaccgaaaatccggtgacagtgcatccaatgtcgtactggaagcgatcaaagccgatccgtccacactgcaggatcagtacgcttatctgacaaaaacaaatgacggacgtctgctgaagtcttcgaccttttacattaaggacgaatccggaacgcttgcctatattttttctatcaattatgatattaccgcactggctgcagcggatcagtttctgcagtcctttatccagacacagaatcccgccgagccatccgcttcccgcagtgcaacccctcagattacgcacaatgtcaccgagcttctggataccctgatcgaacaggctatctccaatatcgggaaaccggcagcactgatgacaaaagacgaaaaaatcaaagtggttcagtatttaaatgatgccggcgcttttctgatcacgaagtccggagataaggtagcttctatactcggcatctcaaaattcacattatataactatatggatgccggtaaataaaaatctgctgaaagtgcaacgttgaaacactttcagcggattctgattatacttccatcttactctgcatccattcgtataaatcctgatatacctgctcccgatctgtttcattcaaaatctcatgtcggtctccggcatacagccgcaaagtcacatcctgtattccggccgcccgatacttctcatagatctttctgacacctttgccgaatcctccgaccggatcgtccgaaccagacaccataaaaatcggcagcgtcttcggtatcatgtagatgctttcccgcttctgcgtctgctgaattccgcagaacatctgatagtaggcatttactgtaaatacaaacgaacacagcggatcggaaacatactgatccagcttttccgtatcactggtcacccagtctgccctcgtccttgccggcttgaattttttacagaaaggtccattcaccatcttgtctaccagcttgcttcgataatgccatccttttaaaactgccagtatcctgcacagatcttttccaatcttgagttccgtcttattctgctctgacatggtccccatgatgattgccccactgagtccattgccatacatctgaatatattgtctcagcagagacgatcccatgctgtgcccaagcataaaataaggcacatccggatattttttcatcgttcgctgtctcaatgtatgtaaatccccaaggacacatgcatttccatatttttcattaaaaaatccatactctgatttgctctgtactgactttccatgccccagatggtcattgccaacaacataaaatcctttgtcacagagatactgtgcaaaatccgaatacctgtcaacatattctaccatcccgtggctcagctgcagtacagcctttacgtgtccttccggtttccattcaattgtatgaatctctgtatttccatcctttgacggaaagtaaaattcatctttcatctttctctctacctgtcatctaattttatatattcgcgatgaggagccagcggcttatatgccggacggatgatcttatccgcattcttcagctcttccagacggtgtgcactccatcctacaatacgtgcagccgcaaagatcggtgtatacagtgacggaggaagatccagcatactgtacaccagaccactgtaaaagtccacattcgcactgacacctttgtaaatcttgcgcttctcggcgattacttccggagccatatgctctaccttctcataaagcgcatactctgcctcgcagcctttctcctgtgcaagctgctttacaaacgcacgaaatacatctgcacgaggatcagaaatggaataaaccgcatgtcccattccgtagatcagaccttttttatcaaaggctttcttatccaacagtgcttccagatactgacggatctgctcttcatcagtccagtctgtcagtgttgccttcatatcctcaaacatctgtgtcacttttacattcgcaccgccatgcttcggtcctttcagggaagccatcgctgctgtaatcgtagaatacgtatcggtaccggaagaagtaactacatgagtcgtaaaggtggagttattaccaccgccatgatccatatgaagcacaagtgccatatccaggatctctgcctcaagcgctgtatactttctgtcttcacgaagcatcatcaggatattctccgctgcggaaagctccggatgaggtgcataaatataaagatcctcacctcttctgtaattatatgcatggtaggcatataccataaacattgggaactgactgatcagattcagacactgacgaagtacgttcggaatcgaaatatcatccgctttgtcatcgtatgtatacatactcaggatatagcgggaaatgttgttcatcatatcactgctcggcgctttcatgattacatcccgtacaaagttcggcggaagtgtccggcgctctgcgatcatggcacgaaattcatccagctgcacctttgtcggaagttctccaaacaaaaggagatatgttgtctcttcaaatcccgggtgctctgcttttaaaaatccgccgatcagctctttgatattatatccacggtagtagaggcttccttcacacggaacttctttgccgtctacgactttggtatttacaatatctgaaatgttggtcagacctgcaagtacaccttttccatttaaatcacgaagacctctcttcacctcatacttggtatacagttctttatcaatcgctgtattcgtctcacaaatatgtgccagctcctgaatcttgggtgtattttcaaaaatgatgttctcaatgtctctctgcatatagcctctccttccgtcatttgttttatatttctttattatactaaagattttgctcctatacaattaactgtgtattaaatatttatgaactattgctgtttattctgtttggacctgcacagaaatcattacacgatttgatcacttaaatagttcgcaagctctgcaaattcttccagagtcagggcttctccacggatactcgcgcctctgccgagatgtccgatcgccgcttcgatctgctccttcgtaaaatccagctccggtgaattcttcaggccattcgcaagcgtttttcttctctgattgaacgaagcccggatgatccgaaacatcagtttttcatcttttacctgcaccggcggttcttcatatctgtcaagacggatgactgcagaaccgaccttcgggcgcggcataaaacagttcggcggtacattggctacaatatatggttttgcgtaatactggaccgcaagtgacagcgctccgtaatccttcgttcccggtcctacctgcatccgatctgctacttctttctgaaccatgactgtaatactcttcattggaacatgattttcaaacaatcccatgatgatcggagtcgtaatataatatggaagatttgccacaactttgatcggctttccttcattctcccgttttgcaagctcagcaatatccacttttaacacatcctcattgatgacctgcacattgtcatagccatccagagtatcctccagaatcggaatcaatgccttatctatctctactgccgctacctttcccgcagcgcatgccagatactgtgtcatcgttccgattcccggtccgatctccagcacaaaatcatccttagtaatctctgcagatccgatgatcttatccagtacatgcgtatctatcaggaaattctgtccgaattttttctgaaacacaaagttatacttctgaagcaccgcgatcgtattctgcggatttccaagtgttggttctttcatctgcacacctctttctctactttttgaaacgatataatttttttgcattttctgttgtctgtcttacaacctcttcgtaagaaattccctttaatcctgcgatctcttctgcaacatacacaagattcagggaactgttacgttttccacgattcggaacaggagccagatacgggctgtccgtctcaagaaccagtgactccaaagggatctcctgcaccacttcttttaatttctttgcatttttaaaggttacgacaccaccgattccaagataaaatcccatctttacatactctttcgcctgctccggggaataggaaaaacaatggatcacaccgcttaattctcctgcatactgcttcataatctccatcgtatctgcggctgcttcccggctgtgaatgatcaccggcaaatccagttgtctcgcaagttccagctgccggataaaccacattttctgtaaatcccggttctccttatcccagtaataatccagtccgatctctccgacagcgaccatcttttccctggcaagcagttgttccatccgcttcatcttctcctcgtccagttcacccacttcgtccggatgtaccccgatcgcaccgtaaatgaacggatatctgtctgtcagctgctcaatcttgtcccaggacgcaatatcagaacctgcatctacgatcagctctacgccattttcccgcatagaaccaagcaattcttctctgtcttcttcaaactgtctgtcatcataatgtgcatgtgtatcaaaaatcatctacatttaacctcttttcgcggatatacggaaaaaggagagaatctgtcttgttttctctcctctttccttaccgttttctatttaaaataataccatactgcctgaaaatgttcaatgcaggactctcaattatctcacatgatttacgaaatcggacgcacgtttctacagattatcaaagatatcaaactgagtcaggcatactaggcgctacgtgagaccacacttagtatccctgcaatctgcgaactggtttgacatgaaagcctggaacattttatgtggatattcccagtcgcccattgaccctacttccaatatttttccacttcctgtgctgcttcctgtgaagaaatgtgaaacttttcctgaacttttccacatatcacttctttttccagttccatttcctgaagcagctccacaacagcctgtatgccttcttaatgtattcacttttttctgctgccatttcaaattcctcctctgtctctgcattgatgaactgaagccatttcagcagctctgtctctggataatcatgttttgccagcttcggaagttccagtgtatgaatctcaaatttatcactatacaacttcctccccttatctgaccagaaatgaaaacggcaataatattcttcatcatcaaacattataaaattcagaatccccagcttatcgtctttatccttctgacgcaaatgggacggcaaaatcttactctcattgatttccttcagattgatcccaagtactgctgccagaaatgcgttacgcacctcttcgtcttccatcagttctttaaaacagaaatctacttttggcttcattaaaaattgtgttggttttttattctccatacatgctcctcctttgttctgatggaatttaaaatatttcgatgagcatgtacttgtatttctgattttattatatcctttgacgcgatgtttcacaatcgcaaatacagacaaactcccgctctttagttactgttcaccccgatcaataacttcttttatccatctctttactctttatctgggaataattttttgaatggcagtctctctgccatatttgaaaattgaaagggattcctttcaagatgaattttattatacttgaaattttttgaggatacaattaaattttcataaagatcctctaaaaaatttcatacataaaagaccagatatcaagtacagcaagtataccttgatatctggtctttgaaattatctcctcttacaacaccacatcatccactttttcaaaattatccaatctgtaagactccactgtcgcctctgtcaccagataaaatctttctcccgcgtacaagcctctcacttctgaatatccgctcaactttttctcaaatacacaagtaaaccctttttctttatcataggaataaatgtagtattcctgctggttcttgtatcccgggaatccaatcaggttcttctccgtatctacaaacgctgcccgataattataggatacatctgttgaatagcactcctccagcactgttttcgcaacttcttttacgtctttcggatccgaaatatcgaacatagacagttttacgccattcactgttgtcccatcttcctccacatccattccgattccaagaagcagcccgtctccatacggatgcagataatcagaaaatcccggtatcttcagttcgcccagtactttcggctttttcggatcagacagatctacggaaaagagtggatcaacttgcttgtaagttacaaaataacaggtatctcccataaatcttgctgaatatactctttcatcttctgccagattatccagttttcctgtttctttcaagtctttatctaaaatataaagtgcatttgtagaatctgctccctgactgcctgtattgcttgcactatccgtcctcagtaatggattcacaccgccggatgtatcatcattttcacggattgtggtcacaacccgcagatatccgttgtattcatcaatactaaaagaatcattgaccataccatcgatcacaacatcgcccgttccatccagctctccatttttataagaaacttttcgaatctctgtctgtgtcaccggagagacttttgcgtcatagattgtgtcatacacataaatattattctcacttacatagcactgactgccatctccgaagaatgccaggtgatcgatctgctctgtcgggtctttcagactgaatgaagtcactactgtataaactcgtcccttttcctgctgcggaagtaaaatataactgctgtccatcactttcccctgcacttccggtacataactgctgacatcattctttgacccggaaatatcggcatagaacgtactaagcagatacacgtaatctccggatacacgcatagtatggaaacttccgctctgtgacatctctcccaaagattttggcttttccggattgctcacatcaaaaacttccgccacagtatgtgtcacacttctgacgactccctgactgtctgtctcatcggtggttctcgcatacacacagaccagtttttcatcttttaaataaatctcgatcagataatcatttgcatccatggaaatggttcctacttgcttcatctcttcagattcaatattcaggatctgcaccttatccatgctcatgatatacagatactttccgtccgtcttgacgacatcaccttcaccgaccccctctgtccgcacattcgtatcggaatgtgatacagcctgatcagcgactgctttctcccctgtataaagagccgctccatcagctccccctgtgccatacatgatctcttcctcttctgccgctgcctgaacgtacttgtaaatctgatcataatccttcgcacttgccaacgcagcagtcgactcagcgactgtatcgtctgcagccttttccgctgctttttgtgcttccttatcctgcatcattccacgtccggaaagtgcaactgcccccacaacaagacaacaacatgccgctgctgccacaattccataaactggtgtccgttttttctttttctgtgccagtttcttttcaatattctcaggttttaaagaatcaggcacttccatcccctctgctgactgcacaatcttgtcttttatttcctcttctgtaaaatgtctgtctcttttattttccatccttatacctccacttcctgaagaaccactcgcatcttctccagggccctcttttttctggaacgaaccgtaaccggattcatatccagcatctgaccgatctcatcactttggtatcctccaaatactgaaaatgaaacaatcagacgttcttcatcatccagtttccagaatgcactctttacatcctgtgagacagcatagtctgactcttttgatggataagtctcatccaactcatgtgtctgggctctctttcgaaactggttcttacaatgattgctcaatatggtaaagatccagcttctgaaagactcctcctttttgagactggatatcttttcataagctgtcaccacagtatcactgactgcatcctccgcctcctgcggatgcttcagagtatagagtgcaaatttataaagttccacatagattctggaatacaactccgaaaacgctttgacgtccccgcgctttgcacgtcgtatcagaactgcttccgcacttttttgataatcgtacatccgcatcccctctctttcttttttgtttgtgttactgttcacaataactcttttgtcacacataagagtctttcaagtgaagttttgttgcatggaaaataaaaaatcagggagattttttgtttctccctgattttttcatctgtttaatctctaacctctatagtaattgatcagacagcccttcaaaataatctctctttcggcatctgtcagatcacccagacggaactctacttctttcagttcatctcctacaacataggccttgatcacatctgccttttcttctactgcgtttctcacatccggaatgaagatatagtcatcattcttaaatggaagtgctttgtcatccgcatctgtcagaagcggcagcattccccagttgatcaggtttgaacgataacgttttgtagcatactcgttggcaatgtttgcccatccgcccagtactttctggcaggatgcagcctgttcacgtgcagaaccgtctcccggtttcactgcaaagatcgtacttccgactcctacatttccttctccgacctgtgggaatttctcctgaaccttcgccatgaccggttttaattcttccagcacctcaagcggacattttcctgcttcgatcgccttctgtgctgcctgtacttctttggcgcgtcctacatatgcaggatcttttctggaaagtgcaaattctgccagtcccagcggattcgaacgataagaagaagtctcaccggacggaatcagttcatctgttgtcgtaacaggatcgtggatctcagatacaaccttaagaaccagattctgtggaagtgctgacatttccggccagtctttgatattcggaccaaacttgatctctacacttggatctgccacgcccttgctgtcaaatacacgatttgcataaatgttctgatcaaagtgatatttctgtcccttgtactcgacatccattgctgtcgccggtgtcaggaatcctttgtttgccgctgttgccgcaatcgaacgggcatccatcaatgcaacagaagaaatctgaccgttctgcagcttggaaccttctctgttcgggaagtttcttgttgtatgacggattgagaacgcattgtttgcaggcgtatctccggcaccaaagcatggtccgcagaatgcagtcttcacaacggttcctgcctccatcagatctgcgatcgctccatttttcacaagttccatataaatcggtgtacttgccggatacacgctgaatgtaaattcatccgcaccgatatttcttcctttgatgatgtccgctgccgcacagatgttttcaaatccaccgcctgcacaaccggcaataattccctgatctacatacagttttccattcacgatcttgctctggagagagtaatctactgctccatccagactgatcagcgctttcttctcaacttcgtgaagaatgtctgccaggtttgcatttacttcatcgatcgtatagacattgctcggatggaacggcatcgcgatcattggtttgatctcactcatattgacataaaccattccatcatagtaagtcactgctcctggattcagttctttgtatccttcgcttcttccgtggatctcatagaattcctgaatcttctcatctgttttccagatagaagacagacaagttgtctctgttgtcataacatcgattccgattcggtaatctgcgctcagttttgagactccaggtccgacaaactccatgactttattgttcacatatccatttgcaaatgtagctccgataatcgccagagcaacatcctgaggtccgactccttttgccggctctccatccagatagattccgatcacttctggtttcttgatgtcatatgtcttattcaaaagctgttttacaagctccggtccgccttctcccattgccatggttcccaatgctccgtagcgggtatggctgtcagaaccaaggatcatcttgccgcactctgcaagaacctctcttgcaaactgatggatgactgcctgatgaggcggaacatacacaccaccgtactttttcgcacaggtaagcccaaacatatggtcatcctcattgatcgttccaccaactgcacagagactgttatgacagtttgtcaaaacatacggtaccggaaatttttccagtccggaagctcttgccgtctgaataattcccacaaacgtaatatcgtgggatgtcaatttatcaaatttaatctgcaggcgttccatattgcctgaagtattatgactgtccaggattccataggcaatcgtattctttgcagcctcttctttcgagacaggaagtgacacatttcccgtatcttccaggatttctgtgccgtttaacaagtacacaccgttatcatataatttaatcatggtaacctcctttgtctttccaataatttcactaactgtttatcattttagcatgttaaagagggaattgcaaaaaaattctgcgggattatcttgtctcccgcagaatttttacaacttccagtctggtctccccgaccgtgatcacatcttctttctggatcacaattggcttatgaatctgttttccattcaaatatgtatggttttttgaaccttcatctctcaagtacagcttatccccacttcggatgatcgcgcagtgtacctttgatactcttaaatcttccggcagggacaaaaacttgtcatactctgacgatgcactgacccttccgattcccagcgaatcataaaaaataaaactatactgatcctgctgatccacatcttccagaatgatcttccagcgtctcttcgccggggcagaagatgtacggcgttctgcctgttctctcaccggacgacatctcggttctggttcataatcatcctcttcctcatcatcatcttcttcgtcatcatagtcatcatcataatcatcttcagaatgatatctccgttcaaactgattataatcttttttctgttttaataattttgaaatcgtaaagaagattactgctatgatcgctgcgatcaatattccgataattacccaatacaacataattcctatcaactcctctgaaggtatcttactatactttcagaatgagggcaagcgaaagacgaagaaaatttatcttgttcgatccactctactgcgcaaaaggaacccacggacagcgttttgcaatttcctgattatatgcttccagatttttcatctgttctgcaatatgaggcacattcatccgttccacaagaacctgaattgtttcttttccttcttccgccagttctttgcgtctttcttctgtaggaattgacggtgtactcatgtggtctttcggatttccaaaataatatccgatggaaccactttgatatgccaatgcgaatacatcatcaaactccgcacagctctgcttctcctgatgctcatattttgtagtcagcggtacatcttccaatctgcccagcatatcataagcgcccaccgtaattgcatggaatgtatctgcagatttaaaaacatcctgtccatttctcatcagctgcatgatcatatccatatacaggatcggagttcctgttttatccataaaatctcttaccatcggactcactgtcatatgtgccggaccatgtgcactgatataaatctgtcttttaaatccctggcgtaaaagactttccgcaattcctgtcagataacgaattccttcctgaatgctgacctgaaccgttcctcttccacttgcagtcgctcctgcataaaaatatggaaggccagttaatacaagtccgtcacatgcctccgccattttaagtgcaaacgcttcactgactacggtttccgaatccagaggaaatcccccgtgcatttccacagttccgaccggaacgatcacaatatcatttcgtgtaagatattcttccacttcatcattcaacatcttcggtataattcttgttctcatttttcacctttcctcttataactgaaatatctttttggcattctcaaaacaaattttccggtaggcctgtgcagataattttccttcctgatactgtctgtccagccattctcccaatggaaataccatatccgtatttaccatatctgtaccgaacatcagacgatcctgaaattcctccaaaaattgtaaaccaaacttttcatctctcataatagcacatccaccactgtttgcagacagatctgcgtataagtttttataatttctcataagacagaccaatctgccgccttccctgacaggacctctgccccattccattcgagatttcagatccggcttcgcatcctgactgatttcatgccagaacggctgactgtgccctatgaattttaatccgggatatttttctaaagcttcttccaacatcggcagtcccggttcatcgacaatgccatattcatatccctcctgcggactcatatgaaacaggattggcattcccagtttttctgccgcctgaaatacagcctgaacaaaaggatggtttatttttctacagatcataaactcaccaattcctacagctccctgcctttgatattccctgagcctctcttcaatggtttcttcacaattttcatccagattacacatccatacatatttttcaggaaatcttctggccagttctctgcatttctggtttccggagacagaagccattgctccttctgtctctccggatgacatgacaatcgctttttcaatctgaagctcctctaaatgagcaagcatttcttcgcctgttgatatcttgaatttttctgttcccggaaccggatctagcgctgcatgtaaatgaatatctatttttttcatagcatactcagcctcattttctgtactttattttgcctttaattctgcatacatctgttctgtagtctctttattcaaattaaagatcagccctactccaatcaactctaaagcgcaagttaccactggaatgatattgaccaggaaataaattccattcactgcttccgctgtctgcacgacattagaaccggaaacaaatccgattgctgccaatccgaaagaaactcctgtagaggcaatggtcgaacctatttttctactaaatgtatataaagaatacatagaaccatcgcttctttcattaaatttccattcgctgtaatccagacagtctgtaacaagcgcccagatcaacattgtaaatactgtctgtccgatcgttcccaatacaaccaatgccgaatacacatatacatttttaatttccatgacaaccggaatgacactaaagatcgtactggaaataattgctgccatcaaggttgctttttttccgaacttcgctaccagcttcggaaccaacgggaaacagatcaccagaatcggaatggttgcaagactgataatagacatgacatctgttcttgcatagtactctttaaaaatgtagcttcttacctggtttgatccggtaataaagagcatacttcctaatgttgctaccataaccccgatcaatggtctgttatgtacagttgcttttaatactttaccataattaaatttctctgtcttttccgtattctgtcgaatacgctcctgtgtacaattcagcagaacaaaatagctgataatacttaaaactccaaaaattactgcgatcaaagtaaaacgctccggaagaatattgctctgcttgtcaaagcagacaacaggaacgatggaaagtcctacgattcctacgatcgttccaccgatacttcttgctctggaaagcttacttctctggatcggatcatcacttacaacgctggccatcgcaccaaatggcatggaagttcctgtgtagctcattccatacagaacatatgcaaatgctacataagcatgaagtgcaatcccttccaatggaacattaaaaaagcaaagcacaccagataatgccagtggaagcataaaaatcttaatccatggtttgaatttatctccggactttccaatcatccaacgatctgggaaagatcccataatcggatcattgatcgcatcccataatctggccactaaaaataacgttcccatccatcctgcgctgattcccaatacattggtacaaaaaatcagaaaatatgcatctacaaataaatttacaaagctgcccgccatgtctccaaatacatacccgatttcatccttcaccccgaacgggcgaatttgttttttgttcatcctgcttgtcctcttttctttttcttttcaattcacgtgatttgtgttatcctaattataagttataataattgcaatttatattgcaaattcatcaaattacattgcaaatctaatatttaattttatcgttttatattatttgcacaaaaacatgagaggatttttatgaaacttcacgaagctaaattattattaaatgaccccacattttccatcgattccattacttatcaggaattagaaatggacagcgactatgtggatgtacatgaagatatcagttactcgaaagacaatgtagatttacacagccatactttttttgaaattttattttgtcaaagtggttctttacaatatatggtcggcaatacccgttatcagctggttaaaaattccattgtatgcattcctcccggtgtcagccactgtccgctttatctggaacagctttcagaaccttaccgcagaactgtgatgtggatcagcaataaaatctatcatcaatatatgaaccttttgaacaatgatccaatcgaaaaatcgccctgtttactgccgcaaaatgtattccttctctccggaaatattctatatcaggtagaagaactttacgaaaaaatgttaaacattcctcctgatttttcgggtgcagaactctataagattggtttgtctgcgcaaatcgttactttatttcatcaatttttaaattctcatgaaataaatcctctaaagccggaaaaaaccattcttttggacgagatcattcactttatagaaaatcatctttccgaagaattaagtgcgaaacgaattgcagctcactttctggtcagtgaatcttctatcaatcaattgttcagtaaacagatcagtttgagcctttatcggtatattacacaacgccgcctgatcgaagctaaaaatttaatttccagccagacaccattaaaaaaattacctgaactctgcgggttttctgattactctgttttctacaaagcttttacaaagcaatatggaatttctccaaaagaatataaaaacagaatttttaaaacacagccataaaaaagcccccggctggggaaagaatcttatcttccccgccggaggctttctacttgtcctactttattcttttcctattacagtctcttcaacagctcttctctctctgcttcaaatccaggttttccaaggagtgcgaacatatttttcttatagctctcaactcccggctgattgaatggattcacaccgagcagatatccgctgattccacatgcgaattcgaagaagtagaataactgtcccagatagtattcgttctgttccggaatgttcacgatcaggttcggtacattaccatctgtgtgagcaaggattgttccgttcatcgcgctcttgttgatgaaatcaactgtttttcctgcaagatagttcagtccatccagatctacaggctcttcattgatgatgatctcttctttggatgtctccacattcataactgtctcaaacaggattctgtttccatcctgaatgaactgtcccatagagtgcagatcagttgtcagatctacagatgccgggaagattcctttctggtcttttccttcgctctctccgtaaagctgtttccaccactcagatacatagtgaaggcttggctcatagtttgccagaacttcgatcgtctttccttttctaagcaaaatgttacggatcgcagcatactgaagtgctccgttctctgcgaaatcattctccagagcttcttttcttcctgctgctgcaccttccatgagtttctcgatatcagcaccacttactgcgatcggaagcagaccaactgctgtcagtacagagaaacgtcctcctacatcatccggtactacaaatgtctcgtatccctcttctgttgcaaggttcttcagtgcaccttttgctttgtcagttgttgcataaattctctttgctgcttcttcttttccgtatttcttttccagaatctctttaaatacacggaaggcaatggccggctctgttgttgttccggattttgagatcatgttgatagaaaaatctctgtctcccactacatcgatcagatgtttgatatatgtactgctgatgctgtttcctacatagtagatctccggagattttctgatctctttggataccacatttgcgaaagaatgtcccagaaattcaatggcagctctcgctccgagataagatccgccgattccgatcacaagaagtacttctgaatcttttctgatcttttctgctgctttctgaatacgtacaaactcttctttatcataatcaaccggaagatcgatccatccaagaaaatcatttcctgctccgctctttgccacaagcttctcttttgcctgtgccacaagctcgctcatatatgccatttcatgctcctgaacaaaaccagctgcttttgaataatcaaatgttactttattagccattgtttatccttcctctctaacttctataaatttacaagcccattttatcaaatctgactttgttaggcaaggaattcttccaaaatctgacgaatcgcctcctctttgagcgccggttcttccagatcctctttttccatcgtcttctccagttctttcttgaattttttcggttcttcctctatattgatggcaagctcctcatcctgtttcttcactacagccgccgctctctgcgatgctttctgggcgccggataatttctgggattctcctgcctccgtacggattacctccagatttttttcatttttacgcattcgtttgtatcggtgcgcacacacattttccagataatccaccatgtaattctccgccgcctcgattttatacgattcatcggaaagctggctgattacaaacaacgctaccatctctgctgccccaagcgcaccatactgatacacctgctcacaaaatccatgcgccatgaaatgtcccacagctccaatcgccgccagaattcccgcaaaccagatcgactgaatctggatctgtctccaggtatgtattttcaggaaaaaccctctgtactcataaatgtatttttctacaaatgcattcacattttctactctgtcatgtaccatacaggcatgttcgtattttgcacgaacaagcttcatcagtttgtgtgtactctttgacatactcccggccgcattcaccagcttacgcaaagtcacataattcattacctttgcaagtatcccaacaattcctactcccagcatcagataaaatatgatgcctgtctccgctactgcttctttccacatagttaaacctcctgtttatggtctttttcacaattcgttcaattgtgtgcctgtggccattataaaacaagtctccccaggatgcccgcaaaaccgttctacataattctacattcggtctgtttccatgcttcttttctctgatttcccacctggatttttccccttttaaacttcacctttcccttgattttcaaggcgtgagcgtttttgaaagttatccacagtccactttcagatgttgtcgtttttccacaaaaacactcgaatcctgacatacgaaagtgaataaacttcctctggaatttccaaaacaggtctgttataattcttctgataacatacaaatgaattttttaattggaggtctgatactatgcattacaaaccaactggagtctgttctcagaacatcgaatttgatatcgaagacaataaagtaaaaaatgtacactttactggaggatgtaacggcaatcttcagggaattgcgcgccttgtagaaggaatggatgttcaggaagtcattgacagagtagaaagaatccgctgcggattcaaggcaacttcctgcccggatcagctcgcacaagcattaaaaacagcaatcggaaagtaattccgattgctgtttttgtttcatatcaatatgattttgtatccctgagtggttgaagcagccgtcataagcatgtctgttcattgtggtgttttcgtacaggctcttataatttattttatagttgcatcatactatgacggctgcttcaaccactcagagactatggaattataaaaggtaagtaattggctatttgatcataattccgtctgtgaaggaataatcctcctcatatggatactccatacctgcaaaatgctctgctcgtacccgataataataccccgaatccacacttatgtatttcgaagtactcacaaaatagtcattctctgcatctttgctccaagcatcaatttgatcccaagcatcatctttttcattgtactgatccacatatataattgtagatacaaaattcactgttgttctggctgttgttccagaatatacataaatccgattccgcccagcttttgtaatggagcattctcctaacatgatgtactgaccttttgcatcctcattctgacttgtgcccgatgcactctcctgcatggtcagataagaaccatccacctttttcgtctgttcatctgatgcctgcacctgaggaactgtaactgatgtgattgttcccagtaacattgcagcacagagcacagacaataccttttttctgattttcataactctctccttccccctctattaagtaaacaatcgaactcgaaaaaactgacgcgttttttcaaaaaaattttaaattttttaaaactttctctaattcatcacgttccatcattcctctcagttggtaatgaactccataatcctcaaattctgctaaaaatccagtttcttcatatcctttcacttggtattctgtaacattgatctttttcatattattttcgattgtaaattcatcaataattccatcagattctttctgtcccaacgaagaatcctctgcattcatgtaaatagaataccagactacttctcctttatattcataaaatatttgtgctcttctttgttccttatcaagaatatatttctgtagtctcattcccttgggcttatactgtattctcacagcctgaattcccagttctttttttacctcccgatacacctgtgtctcatccgcactctcacttgcctgcgtatccatatcctccacattgatcaccgatgcctgacctgtctccccggtaaacttctcaatgatctccttgagataagatttactccccaccgcagtcacacttgttgcaacagccgcgatcatcagcacggcaacagccaccatcactcttcttctgaaaagtggactgtgccgatgcagtttctttttcttttgactttgtgtcttttcatatgcctgtatctgctctgccagccttttttccatttcatcagagactttgatttcttccagtttggagtctttcagaatctctttttcgatttttgccgcttctttttctgtttcttcatgaagtgaaagcacgttcttttttttcatcgttctaccccttacacgattctatttatggttcctacttttgtcttgacatttcactaaataaggttaatatgaaattatatgttttcctcggctattttcgttgcagccgactaactaacacattttttctggaggtttttatatgaaacgaatcatacttaccggaggtggaaccgccggtcatgttacccccaatatcgctctgattccacgtcttttggaactcggatacgatattcagtatattggctcttatcagggaatcgaaaaagagctcatcgagccattcggcatcccttaccacggaatctcttccggtaaactgcgccgctatttcagtgttcagaactttaccgatccattccgcgtattgaaaggattcggtgaagcaaagagactgatcaaagaacttcagccggatgtgatcttttccaaaggcggatttgtatctgttcctgtcgtacttgccggcaaacacaataaagttccgacgatcattcacgaatctgatatgacacccggacttgccaacaagatcgcaattccatctgctacaaaggtatgctgtaactttcctgagactctggagcatcttccgaaagacaaggccgtattaacaggttctccgatccgtcaggaactattatccggaaacaggatcgcggctatggatctgtgtcatttttctgctgacaagccagtcatcctcgtcatcggcggaagccttggatccgttgcagtaaataacgctgttcgtctggcactcccggaacttttagagcatttccagattgtccatctctgcggaaaaggcaaggtagatgactctctgacttctatgaaaggctacacacagtttgaatatatcaaggatgagcttcgtgatatctttgcacttgcagatattgtgatctcaagagccggtgcaaacgcaatctgcgaacttcttgctctgagaaaaccgaatctgctgatcccgctctcagccaacgcaagccgcggagatcagattttaaatgcccgctcctttgaacgtcagggcttcagcatggttctcgaagaagaagagctgaccaaagaatctcttttagaggcagtgcggaaattgtataacgatcgcagccgttttatggatgccatgcgtgattcgaatcagcaaaattcaatcgatacaatcatcgatctcatcgagaattcccgcagatagttttatatcaccactaaaatcagctgaacaggtgtcgttttgacacctgttcgtttacagctccaaaaattcctcatactctacaccaaacttttttctgatccattttcttgctctgtagagtaaactgtgcagcacttctatgcttatctccattctttctgcaacagcagactgcggaatctccaagtaatatacataacgaattgcatcataccaacgtggattatgcttgtacaaggctgcaaaaatctcttcatgcagactggtctgttcatcatccttcattctttccatgtatgtatcttctgcgctgtcctccagatctaaaataacaggatcatcccctgtttccgagagaacttctctttctgctttcttgttataattcaatgccatatgctttgcagtcgtatacatccaggctttgatattgatatccttcaattcatcgatatacatatataattgcagaaatgtactctgtgtaatatcttctgcaatatcgtaattccctgaatatttatatgctgccttcataacgagatttttgtatttttggtatatctcatcataatcttgtttatccgtcaacatgttttctccagtaattacttgattttattcagaatctcttccttgtctgcttctgtcagttcacccatcttccagccaagaccaacctgatctccttcataacgcggtatcaaatgcatatgaaaatggaatacagtctgccctgccggctcttcattattctgaacaatattatatccatcacatccaagaatatctttcatcttacagatcatcttttttgccagcaccagcgcttttgctgccagttcatcatccagatcatataaattgcggtaatgttcttttggtatgatcagtgcatgtccttttgacgccgggctcaaatccagaattacacgaaaatcagcatcttcataaatagttactgaaggaatctcacctgatgccagtttgcaaaaaatacagttatcatctttcattatctaagcatctccttttttgtttacttgtagtataaaacatttttccagaaaatagaagaatattttacttacagaaatcgccttttttgtcgaattttgtcatacttattttattgaaccctcctttttcgcatgatagactacacttaaacagaactactttggaggacataactatgctatacaatatcgatattaataaaatgaacaaattgatgagcaataatgaagatgcacggcagatcatcccgcagcttctgcgcaatcaccgaaatacaatttccacgatctcacatgagattcgcaatccccttactcttgtttcctctgccctgcaggtaatggaaaaacaaaatccggagctcaaagacattccgcactggagccaggtaatgggtgacgtcgattttattattcagcttttagaagagctttctgcctttaacagcagcaatgaattgtattattctgtcttctctatagaacagcttttgaaaaacgttgcaatctcttttgcaatctcgctggacacaaatgaagcagatattgaattttcctcttctatctccgactctctcggtgaatttaccggagacaagatcaaactgcaggaacttgtcctgaacctgctgaaaaatgcagaggaagccatcaccgaacaaggctccattcatctggcagcttcccgcagcggagatatcattaccatcacctgtaccgataccggctgcggaatcactccggagcagatggaatgtatcttccagccatttgtcacctacaaaccgggcggaaccggacttggactggcattctcccgcaagattgcagaggctcacgaaggaactctcactgctgtttccactccgcaggaatccactacatttaccgttacacttcctgtctaggcacgttccttccgtgatacaaaagcacggctgtcagaaatccacagatcagcccgcccacatgggccgcattgtctacgcctgtactggtaaagccaaaataaagacttaacagtaccataaacagcatccctcttccggtgagccttccggcctttcctctgttacgaatcacaacccacagaagtgccccgagcaatccaaaaattgctccggatgcacctgctgagactgccagatttccagtgtaaaaatccatggcaagagaaatcagatttgccccgatcccgctcacaaaataaatcagtaaaaatttaaaactgccaatctccttctccagattccaccccaatgcaccgagcattaccatgttattcatcagatgatcgatcccaaaatgtaaaaaaatgcaggttatcaaccgataatactgggcatcttcaaaaatcaacggtgggtacatggctccgtattttatcataaataccgcattttccgggttacccagaaatgacaatagaaaaaagattcccatattgatcacgatcagtgccgctgtacagactgtctgtttgtttttctgcaatttgaatccctcttttccgcgcccttcatcaggcgcaatttaatacagttattataagtgagtggattcatcttgtccatctgtttccaatatcagatcatcccagcttccccatcttccaagtctccctctgctgattttatgcgccgcttttttccaggcactccatacaccgccggattcccggatgacctccgtatcctttgcaggttcatattcctcttccgtatccaacgtaaacagagaatcagaaatttcctcttcttcccacgcttcctctgtatccgcctcatcctcctcttctgcttcttcgcattctgtacggtattcctgcataatggcatccagatcatagttctcctcaagtgttgctttatgcagttcataagcaagcgtgatcccctgctcatcttcataatccagcttttctacaaaatactctgtcattcggtgaaatgattcacagagctcctgttttcctccaggcagatagcaaaagaaatatttctgttttctgcaaaaaacatattccggttctaacaacagacagcccggatgcagcatatacttttgcagctgcgaaatactctccagaagacaatagataaactgctcaatatcccctttttgaacctgcttgttttcaaataaaaccgccatggaaactaatcctgtgatttcatatgtataccggctctctccatcgattccgcagccgtttacttccagaatgcccggaattttatttgctctcagcatcggcatctgataatcttcctcataaatctccggtacatgaatatgcagacagattctgtttaattctttttcatattttgtattcacttccaacttctcctattttattgtttccagttttttcttcaaacggatctttttctccggatgcgggatttttacctgtcttgttacccggatacacatcttccctctggtcgcggaaattgtcgtctctgcctcatcatctgtcacattcacagacacctccggcatagaaaaataaataagtttccccctgatccgttccctgcaaaacgtctccacatccgcttctttcgcttttggattccgtgccgtctgaaccgctgtcgtaactgcttcatatgccatcccgtctaaaatacttttatcatgataataaaatgtcgtacggacaatgatcagaaataccagaaaaatcaacggcatcacatatgccatttcaactgtggtactcccctttacacacctcatttatatccctcccagacagacgatccctatatacgcagccagtaaaaacggaacaaacggaaatgccgcatctttttgaaaacctttcctgatcagcacgtatcctgcaaacactgctgccagaacatatgcccagacaaggagatacaacacattccaaaatccgagatacacccccgtcaccgcgatcatcagactgtcaccatatccgaaagcctcctgtgtcaatctgctgattagaagaaacactccgcccacaagcgcgcctgtgaccattagtaccagtggaatttttccatgaaaatatccaagacttgccgaaagaatcccacctgccgcaataagccagaccggtatttctctttttctgatatcccacatggaaacaacacataaatatcctccaaaacaaatttctcctatttcgtacatcgtgaacatccccctcttcctatcacccttgatttctgaaccgcataaatcgtccggttcagaccgccgcatgtgagtgagttgtgatacttgccccctgtatttgtaatataaactcctgccattgcacttccatggacacatttgtcacatttataatatcttccgccgtcttcgttccgaattccgtccaggtctgcataagggataaacctgacagaaagctgcagatacgtacactgataatcttcatgataaaccagccctgtttttgtaatatagacgatctgttcatctcctgactccagacctttcttctgaaatccgttccaactgctgaatttcatttcttccttatattctgcagacagatttccaaactgtaaaaacggaagccggattccgtatcgtacaacaacattcagctcattcccattgggattacaatatgatcccgcacattgtatccctttacttccaccgctcacaatactgttctccagacgctttgctccaatactcctgacaatttccgattccagcttcgatgtatttaagaccggaacaagtgctgtatcttccgtacagatcttggacgcatgaactgccgctgcccgaatggttgtctgcacattatgaatttcaataaaatagatcagacatactaccgcaaaaaagaagatcggtacgctaagcgctgcttctacagtaatacttcctcccgcccccggcacagatgcccgttttagattcttattggatggtttttgatttgattgtgtcatcatttttcctttctttaaaatttgtgagtgtctctgccagaggggacgtttcggcagtagatccgggcacctgtgccgggtgcgggagttgtttattcatatccgaaatagagtggaaattcataagataacccgtttctgatctgaacaaggttttgcagtctgagctttgttacacatgcatctgcacgaaaaaaggcaagtcctttttcatagatcagattttgctccacccgatccagcgtacgcatggtaagatgatctccattttctaaaaacaacagcattctcagataacttttgtaatcccatccatctgttacatcagccccttcctgtgtatcttcactggttcccatcttcatcagggaagagagcgacagctgccagttctctgctgtttttaccagagcaacgcgttttccggacatcagagaacgtaaatccatgacactttccccgaatgcccacgctgccagcaatacctgtttgactacaggctccagcatcggaagcgctactgccgttgccagcgccaatgccatagctcctgcctccgcctgttttgctgtatccgtctgcagatatacaaaattcagccccatccggatcaaaagcatcttgttcagcaccgcctccagattttcctgatcagatgtctttccctccagaagatattccacttcataggcaagcgatcgtttttctttttcttcttccacagcatttccgaattttttaagaatgtactcatgaaataacagcttttttgtaacttcatccacatcacttctgaccgaaaatgtccccctccctacccgcagcgcacgggaggaagcctgttcttcccctcgaatctgcttttgggaaacctgcttttctttcggaaataccaggctgatcagacccgactttttcaactgttcaatgtggggaagcggattattttccatcggaagagagctctgattctgattcaacatatcatccagttcttccagactctgattgctctcatcctttgtctgttccccggtaatttcctgctgttcccacttttctgccagagcccccaatccttgaataatcgaaatcccatacagatcttccatatatttgacagcgccttcccgaaatgcctgtccgttttgatctgtgagaaattgaatcccttctacttccggccagattcctgacgctccataatagtgcattctgtcgatcagctgtttctctgagaaattaccggtttcataacttccctccaccgcaaagattccatactcttccaataattctttctgatattctccaaataccgaatacaccgcacgatccatatccagccttgcctgatttttctctgcctgaacggatgcactttccagaattgctgttacaaatgagatcatcagtacaaatatcaggcttaaaaatgctgtgatctcccctttttccacgttagattcccgcactttcacttgtgatcttttcgaaaatatcgttgaccagtgtggtcagctgtgttttaaatatcaagacgagcgcaatgataaccaccaatatcaatatcatctccacgactgacagcccggtttctgcctgcatctctgccacaaacatctgcacccgttctctcatgctctctgtaaattttctcaacatatcgtcctcttcctttcttcttaaatctgaatcgtcaaaaatgccggtacaacaatgatcatcagcaccactcccagcatcagaaacatcggtcccagcagtctggtactggtctcttctcccagttttctggctgctgctttgcgctcttcaaacgctcctgctgcttctctctgaagtaattctgccagtccctttgttccttttcttaaattctgagacagcatcaccgcaaatttacgatagaccggaagcccgcaccgcattccaaaatgctcatagcattcactctccggagttcctctctgcatttcccgcatggtatagaccatctcctcatacacatatctcgtattttcctgctgccgataaaccgatgcaatctgaaaccacgctcttcgtgcaggcattccggctcccagatacaatgtaaatgtactgataaattccggataatccattgccagctgatgtcggcgtgccttctttttctggatttcattctgtttttccagcaccagcatcagggccgctgccacaatccccagtacaaagattcccacacttctcatatcttttgcataatgccaggatattgtttttccttcaatttcatccggaagcaccacatacccggattcacggtctgtctcatctgcttccttcattttcttttccagctgtctttgaaactgcccggcatcatccagctttggcggaaacactcttgccgaaaactgatgctctgcctttgcatctccgtatgtgagtaatgcttttaactcaatggttgttccctcttccgacagatttttatcctgcagttcgccaagaatgtttactgtctggtaatcacttaactcccaggatacctcgattcccgtatccggtactgtttttacaagattcagatcatacctcacttcatccagactcttattttccccaagtatcagcgtttccagctttttccctgctgtgtcaaatactctttgcaattcttcctgtgtatacgactgttcctgtatttccacagtgattttcgctttctgatcttttgtttttgcgaccagcttttgatttttctccccctgcccgtgttcattccgttttaatatactgcttccggatttgttttgcggaattttccgaaaattatcagtcgcatataaggctcccgccagaatcgtaaacactgcgatcaccagtactgccttttgatatccttttctttctgttttcataccatccccttacacctctatctgtgtcatttttttgcccagctgataagctgtcagatataccatcaggcagattgtcataaacaaagtgcctgcaagatttccgtaaagcactgccataaactcaggaaatgcgcttctcatatacagaataattacaaacggaatcacacacatgatcttaaattccagcttttttgaagtgagcatcacctgtatttctctttcaacttccattttttctccgattgcgtctgccgcatgccgaataatggcaatactgtctcctcccagacgttttgcagcgccaaataccgttacaaaattttccacatcttcctctttcacacgatcggcaaactgcttcatcacttcttctgccgtcatattcagatccagctgatgaaccatcgtttcatattcctttataattcttgtttttttcttgtaaatggggcagatttctttccacgtttcccggattgcgttttccacagaatacccgacttttaaaattgcggacaacgtctgtatgctctcacgaaactgttctcggaattcttctttcttctgtttacagcactcttcttcccagttcttcacatagagcaatgcgattggaaccatcaagatccacgctgcccaatgatcataaaacagataggccgtcatccccgtgatcagaattcctctgcacgctgccgccatgtattcccgtttctgaatatcctgctgccagcagtttttctctctgagtgatttcattttccttcataagagttcctttaatttttccatcttccattccctcctcctgaaatttatataatgtctgtaactgaatccttccattctcatacccaagtacttctgtaatctccagtacttttctgctcttatcccggagtcttccgagatgaatgataacgtccagagcagaagcgatctgctgctgaatcgcgatcagaggcaattcaatccccatcagcatcatcgtctccaatctgtgaagcatatccatcggattgttggcatgaccggtagacattgaaccactatggccgttaagcattgctgaagatatcatgtccactgtttcatcacctctgacttcccccacaatgatccgatccggtctcatacgaagtgctgacttgatcagatcacggatcgtcaccgccccttctccttccaggttggcgtttctcgcctccagtctgaccagattcgaaacacccttgatctggagctccgcattgtcttcaattgtaataattcgttcatcttttggaatatagtctgataacgcattgagaaatgttgtcttaccggagcctgtccctccgctgacaaaaatgttatattttgattccacaagaatttttaagaaatttaccgcttcctgactgatacttccccagtcaatcagctgtttcattgtaacggcctcttttggaaattttcgaatcgtcatgatcggaccgtttaatgccaccggacgcagtacaacatttacacgggaaccgtcctccagtctcgcatctacgatgggagatgcttcattgacatagcgattcgcacctgccgcaatctgctggatcacatcttccagctttgcaactgacacaaatctgcgatctgactcaaaaatacgccccgctttttccagaaaaatatgatccgtcccattgatcatgatttccgtgatctcatcatcttcgatcaactcctgcagaatatccagtttccggaacgcattaaacaactctttgctgatccgtatcttttcctgaagcggaataaactcttcttttgaagcctcctccaacacttcgtgaatcagctcctgcagttcctcgtcttccatatcgcaggtcatatccatcttttcaatcacccggtcatataatcgctctgtgtttctcatatgacagtaccgccgtttctcgaccttaccaccttctgtaccgtatgctccaggattttctcatgtccggtccgcaaaagattctccgtatactgctgcagctttgcctttgctgccggctcttcgatcgaaagcgtatgaacagaatcacatttttccagaatcgaaaacagtccgttcacactgtctcccaaatccaggatcaacacttcataaatacttttttccacaatctgctcaaacagctgcatccactcttctgctgtgaccgcctgcagatcctgtaccaccggaatcggacgtatataatccatgtttccaatctggcctgtcatcatgctgatacgaagtcccagatttccggtctcctgttttgaataatacaagagatctcccagattctgttcctgttcttttgaaaaataatgctcacctcctgcatactcttccagattcagatacagaacaggtcctttttctgccagctcttttcccagttccaacgcatacttcgtcttcccgatcctgtgtatgggtgaataaacaccgatcagacttccccttgtctttcggagcgtctttgccacagcccgttccttgtccacagaaagctccagaacctttgtcagaatctgatcaactgactgatacttataaagctccttttcttcgtctgccagatacctcccttctgcttttaccagtacaaatcgctctgctgccggaatttccagtctttcttcctgcgaatattcctctccgatcagcaagatctggattggcttttgttctgcgaattttttcagtggttccaatttctgaaacatatgcatctgaaatccaagctcttttctgcctccgatcatctgcataaggtttctcgcataatctgcctcctgatcacagattacaaaatttttctgatgcaacctatccctcctgttctgtatgattcattcaatcttttggatgaaaataccgctgcgaaccgcagcctgaataaaaataactgacgatcagaatcctctgatctcctgatacaaaagacctgtgaagcaggtccgataaaaacagcactcgaatgatctgctgtgtgaaatgtattataaacgcagtttcccgccttgtccatacgcttttcctaaattgcagttttttgtgaaaaccttacaaactttgatacaccagaattccataaagcatgcagaccccaggaataccaaggcttccggatgtcaaaaaggacagcccgttgattcctaccttccaggaatcctgatccggcaggacgtattgattgataaaatatatcaggcagattcccatcactgcccgcagaaaaaagtttaaaatcacagctcccgctttatttttcataacaaaactacctcctgtggaaacatctgatatatcttattcccacagaaggtagtttatgcgcagtctataattttattttaatctcccggtttgatcgatgatactgatgataccggactccggctgcatccatcatccgtttggatgccatgacactcggggtgtccgcatacttgtcacaatcataaatgacctctttaattcccgactgaatgatcgcttttgcgcactcattacacggaaacagtgacacatacaacttggctccgaccaggcttccgccactgtaattcaatatggcattcaattcactgtgtgtggaatacacatactttgtctccagcggattttcgccttccctcgcccacggaaattcatcatctgagcatcctttcggaaatccattgtatcccatggacaaaatcttgttgtcctgactcacaatacagcatccgacctgagtattcggatccttggaacgcatcccggacagcatggcaactcccataaaatactcatcccaggtcagataatcttctcttttatctgacatgattttcaactcctttattttgtgccgaaaatacgatctcccgcatctcccagtccaggcacaatgtagccatgatcatttaaatgatcatccagcgctccgatgtacatatcgacatccggatgtgcctcctgcatcttcttgaccccttccggtgcagcaaggatacacatgaagcggatatgctttactcctttgtccttgagcatctggatcgcagcagcactggatccgcctgttgccagcatcggatctactacaaatacttctctctcactgcagtctgccggaagcttgcagtaatattctaccggctctaatgtttccggatcacggtacagaccgatgtgacctacttttgcggccggaatcaatgataacattccatctaccataccaagtcccgctcttaagatcggtacaactgccagtttttttcctgtcagctcttttcccaccatctcacagatcggtgttttgattgtaacgtcctgaagcttcagatctcttgttgcttcataacacatcagactcgcgatctcactgattacctctctgaattcttttgttccgacatcctctctgcggatatagctgattttgtgctggatcagcggatgatccataacatgtacttctgacattattgtcctcctttagtaaatgaatttaaaatttctgctaatttttctatcaacaacgtaatcttctcataacactctccatatgcagtcaaaggctgcccatatggatccgggatctcttctgtttctcccgtaaactcagtaagtgtatatacattgtctgtatattcgttcggatattcagaaagtatcttctccttctgagcctgtgccatcgtcaggatcagtgtctccggattcaggttcttctccgtaaacggtctggaagtatatccttccagcgtcatctgattgctctttaaaatagcttctgctttctgatttaccggctctggaaacaaaacgaccattcccttggattcgatccaatattcctggtctaatgactgatgcctgaaaatctctgccgcaaccggtccgcgacaggtatctgtattgctgacaaatacgatttttctgtatttttgctctttcgtaagaactgatgcggggatcctgcagtgtcctgccgccttttccagacggttcataatggcattgccgattccctggagtgcaaatgactcactgtagatctctgacacatcctcctcgtcaaactctctcaaaattcggtacagattccttgcaatagtcttctcattttcacgggaaccgatattttttaccagaccatgggtataaaactcaaccgtttcattcgtcccgataatgcccacctgaacaccctgacggctcttttcataagcaagctgccggatggcaaacacttcctccttgagacttccttctacgatcgtcagctttgctttcggcgcataatggcgatatttcatacccggtgctttcggcgcctgactgctctcactgcccagaatcgtctcatccacgctcaccacgccgatcacttcttccagcatatcggcagtgattgcacccggtcttaagatcatcggcggagaaactgtcatatccaggatcgtagactccagtccgatatctacacttcctccgtctatgatcatctcgatcttcccgttcagatcttcccacacatgctctgccgtagtaggactcggacgtccggatgtgttggcactcggcgccgatacatatccgcctgccgcaaggatcagctttctcgcgatcagatcacttggcatcctcacagcaacggtatccagaccgcctgtcgtgccatatggaaccagagaacttttttcaaagatcatcgtcaaaggtcccggccagaaatgcttcgcaagaagctctgtctccggaggtacattctccgtaatctcacttaaatcttccagatctgcaatatgaacgatcagtggattatcagaaggacggccctttgcttcatatgtttttttcgctgcctcctcgtccagtgcattcgcccccaatccgtaaactgtctctgttgggaatgcaacaagtcctccttctctgagaatctctcccgcttctcgtattgcatcttcgtctatttggtttttgtctattttcttaattatcgtttccatagctttcattataccatttttcttatcagcgctcaacatatttcaggattccattgccgattgcctgggcaagcttctgctgatacgcctcatcgatcaacatccctgcctccaccgggctgcttaaaaatccacattctacgatcacaattggtgactttgtatttttcagcatatagtatgtagtatttcccttaatctctctggcatgctcctgatcgaaatttttcagctctgtctgcattacctctgctgctttctttgcctccttcgagtgcgcaaaataaaaaatctgtggtcctcttacgctttcctgtggataactgttctgatgaatgcagactgcaagtgcaggagattctttgtcgatcaactctactctggctttcagatcttccacctgagaatctgcaagtccctcatcctttgtacgtgtcatcaccaccgtgatctgatgttcctccagatatttcttcaatttttctgcgatctgcagattgagttccttttcctgcgccccgttgatcccgacttttccgggatcttttcccccgtgtccggaatcaatcacaaccgtctttttctctgatatatttccggaggtctcagatgcttcctcccgaatataatgactgtgcagatactctccggcaaactgacatcctgctgccgccgccagaagtaccccgatcatcagcagcagacggatctttgtccgcagtatccccaatacctttttgaaccgcaaaaaaacatcccctttcgcatatactctgtttcatgtatatgcgaaagaaggatgtttcatccacctgtacgttttttataaaacgtttgctgccagatacccttcttctactgcacgattgatatctgctgctctctcattgcagtctccgacaaagctcacctgtacgcctttatcttccagtgcctgtgcgtcaaacagattcggtcttgctcccactgcgagtactacgtagtcacaaggaagagacactttgccctctgcattttctgcttccacactgtttgctgtaatggctgttacttttgttcctgtcagcagctgaacctgatatttttcaaagctctcaaacaataccggtcttactgtcttggattcttcttttgcgatttcttccatcatctctactacagaaacctgacatcccatctctgcaagaagctctgctgtctctgctccgaccagaccgcctccgatcacaaccacacgtccgctcggaagttcctcatgattcaatactttccatgcatcaaatacatgcggcattttacttccctcgatcggcggaatcacattgtgcgctcctgctgccacgatcacattgtccggattctctgccaggatcatctctgcatctgctgttcttccaagacgtaagtctacatgcagctctttcatctcatttgtcagatagcggagtgcacggttcatctcagattttctcggaggaaccgatgcaatgttgagctgaccgccaagtgtcgtttctttttcaaacagaacaacctcataaccttttacacttgcaactctcgctgcttccatacctgcaactccaccgccgatcacaactacttttttcttctcatcggaaggagtgatcgttctctcatactcatatccgttttccgcattgagtacgcagcttaagaattttcggttctggatcgcatctgtacatcccttattgcacatcatacagtgacggatgcgtcttccttctcctgcttcgagtttctttacataatccggatctgccagaagagagcgtcccagacccacgatgtcgcagacaccattttcgatcagtgcttctgcgttctccggtgtgacgatacgtcccactgaggataccggaatagagactgcttctttgatctgtttggtatattttgacatgaaacaatatggctgtgttcccatcgcaggaatcgtatcgttcatatttcctgtatggtttgcctgtcctacatgaatcatatccactccggatctctccagaatttttgcaaactctactgcctcatcgatcatcagaccgccttttccgcgcagtgggttttctgttactacaggtaatttataatcaatacagatatccggtgccacttctctgatcttatccaccacgcgaagtgcaaaacgaattctgttttcaaagcttccgccgtaggaatctgttctgcggttgatcaatgtcgaacagaatgatccgatcagacggtctccgtgtacttctataatatcaactccggctgactgtgcacgttttacacattccccgatcttatccaaaatactgttcaactgctcttccgtcacttcctgaatgaaatgtaccatatcatgacgcatttttgcacgtccgccttccatatcccctttgcggaataattcagccagtgcctctacatcatactccggatggaaaatctggattcccagtttacagtcaaattcatgaactgcatctgccagttttctaaatgcttcgatctgtccgtcatggaacagcttcggtgtcggtgagattgtatttacaggagcaacatctcccaatacaatataggacacgccaccttctgccagtctcttatagaagttaaagctctgttctacaattgtgccgtctctgccttcatatcctgttgtcatcggcggaaacatcactctgtttttcagctcgatctttcccactttaattggttctaataatctcataatcagcctctccttaacattttctttctgctcaatacatgttctactatacacatcccctgttttcttttatatgtcaattaagctttcttcctatcactttcctgctgttttatgaatttgattgaataataaagcgcactatattatgatagaagcaacaataaaaaaggagttctcttatgcatctggaaattgaaaatatccaccatccccaaattaaaaatatgaatctgtccgtctatgatgtaggataccgtgctgcccacctgcacccggaaattgagctgatcctggtcttaaaaggagatccggcattcaacatcaacggcaatactacgtctttttctgaaaaagatatcatcctgatcaacgccaacgagctccacgagattatttcggagaaagcgccgtccaccctgctctcccttcatattcttccacagtattttgaaggatattttccgcagatgagtcatatcagctttctggaaaatacacttttgagtaaaaatgagcgactgttcacctactcgttttgcaaacttttaaagatttatctcctacaggcgccttattaccagctggagtgtgccggtctgatcaacattatggtgcatgacatcctgcagagctgcgcttactatgaaatgtatggagacaaacttgcgctcactaccaagagaaacagccagctctctgaaatcattggttacattgaggaacattctgccgaaagagtgactctgtctgacctggcaaaacacatgcagctctccgcctcttatttatcacattttattcagaaaaatctgcaccgttctttcagtgaatttctgacctacacccggtatctcaatgcaaaagcactgctgatgaaaggtgaactttctctgattgatatctgctacggctgcggattttcggattaccgctatatgaataatgcatttaaaaaatataccgggcagactccgaatgagttcaaaaagaacatgaacagcgactccctccctcataataaaaaaggaaccgtgaagtcctacacaccacaggaaatgcttgacaccgtcacccgttttatggagaacaatcattttaatgaacatcagatttagttttctgtctctcctggaattgacgcacatattctcctggtgtgattccaaactcccttttaaatgcccgaaacaggttattatagtttccaagtccacatattttatagatttccgtcataggatatcccttttccagaagccgtttgcacagatccagcttcgctttgacaatatactgatgaacggtgattcctgtctgccgtttaaattctctggaaatatgatatttactgataaaaaattccttttccagacgttccagtgaaatttcttcgtacagatgatgtttgataaaaataaaaatatcatccagtgcaagtcgggatcgtgttttactttttgtgtgaaattccacatgaatacaggcacgtaaaagcagcacgatcagcattgacagaatactgtcctgaaacagtgcatgcccgaaatctgtcgtttcttttggaagagtcagaagccttttcgaaagattttttatcagcatactgatttctgattctgcctgaatgactacaacctgatatggaaccacatgaaagcaggactccagatccgtttgttcatcagacaaacgtttcagcagttctgcagaaaacgaaatctgaagaaaatgcagcggagttttcgacgccggatattcaatttctaccgatgtacccggattgaccagtatgatttcttccgttgcacaaaaatatgttttctccctgcttctgcatgtacattttccggcagtaataaaaaacactgtataatatgtagtcgccggaaatttcttacattttgattgtgtatatttgtattcctttgcaatatattctttcatgatcacctcgttaaaatatatgaaaatcactgtaaatccctattaaaactattcaaaataaacagtatatcaatttttgatagttttcaagcaagaattggatatgtttcctattcagataaagatataatgaacatcgtaaacaaacgaaaacaaaaagccacacgataaggaggaagaattgtgagagagttttcaatgaaagacaaaatcggctacacgctcggagatctggggtgctgctgtacagaacagtttcgggcaatgtttttgaccgtattctacacgctcgtactgaaagtaaatcctttacatgtcggaacgattctgttgatcactaaaatctgggatgccatcaacgatccgatcatcggcgctttgatcgatgccagaaaatctacgaaaggcggacgttttattccatggatcaaggcattttccattcctatggccattatgtgtgtgattggattcctggatgtgagcagctttgattataaattaaaactgatctacattttagtaacctacgtattatatgaagccctgtatacatgtgtcaatgtaccgtttggttctctgtccagcgttatgacagatgatgtcaatcacagaacagacttgtccagatacagaagccttggcggtacaatctttatgacagtcgtcgtgattgcaggtcctttggttttatataaagacaacaacccgattccttccagatttaccctgatggcactgatctgtgcaacaatcggtgtattctgcctgatgatcacaagcagctggtgtaaagagagagtttccatcactgtggaaaaaagagagaaattcaactattttgaagcactcaaacatatcattaaaaacagagcgcttctgggactcattttctccagccttgcaggtatgattgcagccagtgtggtaaacggactgaatacttatttatttaaagattactttggtaatgttcagatcatggcagtatccggtatgctcagtaccgtatattccattatcacttttgtcggaacaaaatttgtatctaaaaaattcggaaaaaaagaatggtgtatgtacggagccagttttgccgctatcgtattcggaattttattcttcttcccgatcaagaatccgatcttgttcattgttatcaacggaatctgctacctcggtgcaagtggtttccaggtactcatctgggctatggtaaacgatgcgatcgattaccaggaactgaccaccggcgacagaaaagaaggtatggtctatgcaacctattccttcttccgcaagcttgcttctgcagtaagctccagcttaagcagctttaccctggctctgatcggatataacgtaaatgaagctgtacagacagctgctgtaaaagcacatatctggaaatcttatactgcgatctatgcgatcggatatttgattgctgtactgatcctgtattttgtatatccgctttccaagaaaaagacagaagaaatgttagaaacactcgcgaaaaaaagagcaaaacaaggagaataataccatgattcgttacacagaaattaaaaacagaaaaaatcatactctacgggcaatgttaaatcttccggatggagtcagccatcctccggtcgtactcaaccttcacggattcggcggcagcttatccggttataaatacgcacatacacatcttgcccgcgttctggaagcaaacggaatcgcctgtcttcgctttgacttctacggctgcggagaaagtgacggagaattcgaagaaatgaccttcaccggacttctggaagatactcaggatgtctatgaatggctgaaaggacaagattttgtagatacagataagatcatcttatccggacagagcatgggcggatttgtcgctgctaccgctgctccaaagttgaatccttacggactgattttgatgtgcccgggtgccggaatgtggaatggatgtaaagaaaaagcagatttcttcaaaaatcagggaatgacatttgctgatatggaaggactgaaattcggtcttgatttcaactatgacctggcaacctactctccttttgaggatgcaaaaggatatgacggcaaagtcctgattcttcgcggaacagaagataatctggtagatgataaaacctgtgaaacatatcttgaaggatacaacggaaacggaacttttgtaaaaatcccgaaaggaaatcacaactttgcaagtatccctgccagagaggcctgtgaaagcgaaatcctgaattttgtcaaatcgattctctaattcaactttacagaaaacaacgacgctgaaattccaaaacggaatttcagcgtcctttttatattcttctattcactttttaattgatgtactgcgagatcagatcccatactcccgaattctcccagccaaggcgccattcggcaacaccagcaagatcattctttttgatcagctttaacttctcttccagcgactgactgtcttccagccagatcttgtatgttcctccgtctgcatcccactgtgcataattctgccttgtatcttcatcccatgacgcctgtacaccggcttcctgcacccgtttttcagcatcctccattcccagtgccgtactggtcactttatttggataatctgccgcttctgtaccggcttctgatgccagctcttcctgcgtcttcggtgtctcaaaccacagtcttgtatacaacgggatcgcattgatcagtttttccttaggaacagactttaacgcattctctatgccgtcttttacgtatccgtaagacgccacagaacctgcttcataagaaccctccacatgctcatcataccccatgatcactacataatcagcaaatactgactgttcttccagatcataaaatgtgttgtaaggcatcggaacataatcgtctacggaaaatgccagtccattctgatggcacttgatggaaagttctctcacaaactgtacataatcttctccgcactctgcagaaatcagttcaaaatccagattgattccatcaatcccagcctgcagagctgctgctataacctgatcgatcaggttcgttctcctggaagtatgacttaacacctcataagtctcatccgccgaattgattcccccatgaaaatccctgagaacagcccacacttccaaattggactgatgcgcataattcacataatctgcgtccgcgattgaattcagattcccctgcgtatctgcaatatgaaaccaggtcggtgcgatcgtcgtcagacctttcgtggatgcaagcatatcctgaatatacccgttggcagtcgtattctctacattgtgccaggccatattaatcttgtaatctttcgatatacctgtgtactgtggttcttcaaagctgctggaaatcgtctcctctttgatatgtttcagcgaattcgtctgtacatatccgataaatccatcgctggtgcgaactttcttccagccatcctcatcctcgatcacagtcactttttctgatttttttacctctgtcaggatcggactctttactccaccctgaaaccgcacttgtgtatcccgcttcatctctgccacagtcgtctttccgaactcattcacgatcatcacacgattcggatcttgatgttctttgcattccatattcgtgtactttttcacaaagtccaaagcaacatatgccttattatcgactgtctgccagatgacatactcttcacttttttgttcgctgacttctgtatattccttacttcctatgtttgcaacaacacttccctgcggcaatgtatacaacagtaaattctcattcgcatcccagtaaaagcgcttattcacaaaatcatgcagaacagaatattcaatgtaagcctgttcgtctatcagacggcctcctgccccatattctccgttgtccgcttttgcgatcacctgattattcacgatcactgcgatatcgtccgtacctgtcattccataatattgttccagattcgccttctcattcgatgagccatatcgcttccagaaaatcaggcccccaacagccactatgatcaatatgatcaccagcagcatcctgatcagcatatttcttcgtcttcgccttgccctgcggctctttttccgtctcttagacggcggtatgcgattcgaatccacccttgtatcctctggtcctccggcaatcctgcgtgggcgccttcttgttttgttttgctgtgttcccgccgtgctgcgggttttcacaaccctctcttctctttcgtccatgcgtacctcctatacagaaccattataacatactttttttaccagtcattactaatttgccattttaagaagtattttaaacattcttcagaaatattttaaatctttttgtccgacgtaaaaggggatctacgcctgttcttttgtcttgatatttacaaatgaaagtgattcaatatatccttctgtatccagaatatagtcccgcatataacttccttcttcccttgtcatatgtgccgctacaatctgcatcggactggccgggaatccatccatactgatgtatactcctttattttcatatttttccagttcctcaaataattcctgataagctgtctcatcagatttcatgttcttctccttccctccgtgagctctgataaatatccccggtaataactgaccgcagaaggtatgtgacgtacctttgaattatcacggtacaaaagatagcatgaactcacattgaatttacttttctgtctgatattgatttcgtccccgattcgagaacattgaatttcgaatattttaatgatagatatgctctttgatgtcttgataaatgaaaaattcagcaactcgtttcagatgatctgatcgtctcttttgtatccctccttcttgaataagtgatatttatccggaacactatcttctgtactgccaattatagggattgtgttccgtcatttcaatgtgttttttgtttataactacttcccttttgttgataacatgaaagaatgcagaagtctcactattttcctttacatcttttttctttttgtttatactaatagtgaagaaatataagttattattttcctacttaatgactatatttttcaacatttcaattcgtaaggatgtgagcacatgaaaatcgaaaaactgaatgaaaatcaaattcgttgtacattgacacatgctgatttagcagctcgtcacttaaaactgagtgaactggcttacggtacggaaaaagcaaaatctctgtttcgggatatgatgcagcaggcatcctttgattttggatttgaagcggaagatttacctctgatgatcgaagcgattccttcatctggtgattccatcgttttgatcatcacaaaagtagaagatcccgaggaactggatacaagattctcgaaatttacacaaagcatggattctgaagcaagcccgacagaacagctggaaaagctggagggcgcagaagacttcctgaacctgctcaataaagtaaaagaagcggcagccgacatcaagcctgcctccaaaccacaggaggaaccagcaccgctcaatgtacgtctgttctcgttcaaccatattgatctggtcattcaggcagcccatcttctggctcctgcgtaccacggttccaatacactgtatcgagacgatgaagcagatatgtatattctggcactgacaccatcggatcattctgccaatgaatttaacaagatctgcaatatgctttctgaatacggcagtctggagaaagcctctgcttctgttcttgcatttctggaagaacactgcgaggtcgtgatttcttccgatgcgattcaaaagctgtcacaggtataaacgcatataaaaagagtgcggacttaagctttactgcccagtccgcactcttttatgttataagtcttattttgctgctcttgccgcattgatcttctctaccaggagatctgcatcgattccgtgaaccatcgctgcctcacccagtgtctccatctgtgcagacgggcatccaaggcagtgcattccgatttccattaagatcggcgcgcattcaggatatacggataataattcgccgattgttgtattctttgtaaatgtttccattatgattcctccttctattattcaatgttctttattataatctctattttttaaattatcaaccaccaaaaccggaaaatacgttttaaaatcaaccctattttgcttgaattttctgaattgtttcttctgtttttactgcttttcgaatactcaaaagtcaatatatttttctttctttttcgacaaacaagcaatttcataataaccttacaaaacatccgttctttttttcacaaaagtaattcacaaaaaacacctgtttgagtgtggataatgtgaataacttttcggaaatgtcgtgttttccacgttttttcatattttgagtgtggataagttgaaaactcctatttttcaaatttcgacatttttttacatttttgtgcatcttgccatttatttattttcctgttgacttttttgtttctttctatctcattttcccccgaaaaaataccgcatttcaaagtcagtcaactttaaaatgcggtctgaatttacagaactcttctgatcgttatgatatttgtataagttgcgctgcagattccaatcccgtcagcttcgttcattgcatttacaatcgtcccgtctcccatgtacagtccgacatgcccgtcatacaaaacaatatctccgggaagtgcctgttcatagctgacagcaactcccacattttccatatcccatgtcgtccttggcaggctaatcccgaaatgtgcatacacagactgtacaaatccagagcaatccgctccttctgtcagactggtaccgccccatacgtacggatttccaataaactgacaggcgtaatctatgacagcctgtcccgaagcagcctgattttgcacaatactctgggcggaagcttcctgaaccttctgtgtttcctgcactatggtctgctctggcttcttcgcctcttctgcttccctcgtctctgcgtaagaatacgttgtctctatactgatatactccccggatacccagccggcgatctcccctgcctgcaccggataccatccatcttttggttccccagtaatttcatactcctgattctgcataatctgtgtcagaacctgtgtctctactccctgaccagccctcacattcagaacatcagctgttaccgttgcaacctctttttcgtattcccctgcatgtgactttgcatcttctcccaggtacaatgtatctgccggaacgaatccctgcgcatctcctgactggatcttcacccagtcttctttatattcgagaactctgactgccgaatccggatacaattttccgatccagtcactgttctcatccggcgcacttcttatataagtaaattcttcacctgtattcgaaaacgccatattcaaatactcaccctcacctgtcggtaccagatataactgcagattctcctttactttcgtttcataacaatctgttactactgtttcgattcctgcagccggcaaaaccggatatacttccgctttctgatctgccgcataaactgcactccccggaatcatcatcattcctaccagagcaggaatgactattttttgtttcatgtgtgctgctttcatataaaacctcctctgttttctgtctttatcttttgtaggaagttttaaatgttacataattattaaatttgttacagtgtgattatatcagtggttatacgatgtgtcaacagttttaaaagggttttttctcctgtatttcgacatatcacgatatattatgtctgtttattttttatttattaacttttttgtaacattttatcaaataaaatattcttttttcaaaaatcctattgacaaactttcaaaactgtattatagtctaaacatagcaacgattactattattgttttgaaaggagaactcacttggctactttgaaatatagcagacagcgagagtccatcaagaactatctggcatcgaccactgagcatccaactgctgatacggtctatatgcatgtcaaagaggagtttccgaatatcagtcttggaactgtttaccggaatttaaatctgctgactgatctcggtgaggcagtcaagattacaactcctgacggcggggacagatttgacggtgatgtgagacctcacaaccactttttctgcacttgctgcaaaagggttctggatatcaacatggatatgcaaaatgtcacagagctaaatgaaattgctgctaaagattttgatggaatcattgatttctgcacgatgactttttatggaaaatgcggaaactgcatcaaaaaatcttaaatttgtccataatatggaaagttttctgattccgtattataatattaaccaaaggccgactcattccggtcaaattcaattaagaaaaggagatttgaactatgaaaaaatttgtttgtacagtatgtggttatgttcacgagggagacgctgcaccggctgaatgtccagtctgtcatgcaccagctgataaattcaaagagcagacaggagaaagatcttgggctgcagagcacgttgtaggtgttgctcagggcgtaagcgaagacatccttgctgacttaagagcaaactttgaaggagaatgtacagaagttggtatgtaccttgctatggcaagagttgctcacagagaaggatatccggaaatcggattatactgggaaaaagctgcctgggaagaagcagagcacgcttctaaattcgctgaattgttaggtgaagttgttacagacagcacaaagaaaaacctggagatgagagttgatgctgagaacggagctacagctggtaaattcgatcttgcaaaacgtgcaaaagctgctaacctggatgcaatccacgatacagtacacgagatggcaagagacgaagctcgtcacggaaaagctttcgaaggtctgttaaagagatactttggctaagattttcctatcttaatatagaacctttaaagaggcctggtcttgatcagtgcctctttttcttttctggacagctgtttgatggcatattctcttttcattgcctcttctcttgtctgaaattcttcatagtagaccagttccaccggtcttctggcttttgtatacttggctcccttcccggcattgtggcttgtaatccgctttttcagatcattggtccatccggtatacagagaatcatctttgcattttaagatatatgtatagttcattttgtcacctcttatcaatgtcctctattttactcctcttttgtgctccaaatcaagcatcgttatggaaaataaaaagggatacgaaacattttatttttcgcaccccctgactgttattccatatatactgccggatctttcgcttctccgtcttttgtcacctcgaaataaagatttggaccttctacgctatagtattttgtcggttcacttaaatatcctacagtctgtccctgtgccacaaaatccccaattgcaagcggcacatctttgagctgcccgtaaactgcactgtaaccgtttcccatatccagtgtgactgtcactcctgtctgtgcagtttcttcaatgttggttacgattccgtctgcagaagctcctatcatttctccggcttctcctgcgataatcattgcaggattatacttgtactgttccagtgtctgaaaaaataccgtcttatccatgctgtatccaagaatcacacttccacttgccggccatgcaagtgtactgttttcatcaaaataaacttgttttgccggtgctgctgtctctgtctgtgtctctgcgctttcattcgtacctgtctctgatccattttctgcggatgtatcttcttcggcctgcggcagaacaatatcattggtattggttgttctggtctcttctgtaacggtgttgttttttgcaagctggcttcccgttgctcttcggtgatagctgttgtatacaacggctcccacgacagatactacaacgacgaaacagatcacaatcgcaactgacattcctttactttttaaggaaggcttttcattgttattcatattcatcacctctggctatatttttgccagaagcactgctgtttattctggtttttccaaaatttcttcggagtttgtgatcgttgttccctcaaagaagaattccagaatctctttataattttgaccgtttttcgccagttcatttgccgtccactggctcatcccaagtccgtgcccttttcccattgtggtgattttgagtcctcctgattcttcctgtatggaaaatgcactggatgcaagagataacgcatctcgaaattcatctccgctgcagaccgtgtttccaatccgaaatttggaaacatatcctgcagaatctttttcctggatttcaaaatcttcgaatttcagcgcttttttggcttctgcttctccctctgccgcttccaggaacgaccggcactttttcttgatctcatcatacgaaaactgatacacatgcatctcgtcttccgccttcacatcctccagacattctcttgtcgcaagatacggatatgtatccccgccgatcacttcttttccgcttcttgtctttccgttactggattgatgatacggaacccaggcataagaatcctgataaaaaagcacttgtgtctctgtttcatccagcacctctcttaatttcttataataattctcaaaattttcagctccccattttttcttcaattcttccggtgtcagatatgcctctttgaacacaacatcctgtgcagcctgctgatacagcatggtacgaagtactactgcctgtgccttcagtgcctctttttcataggatgctggcattgttttccctaaaattcccatcatgtattctgtccacggaaccgtcctaacagtcttctcaccgtcctgatcttctgtttctgcctgaacacaaggttcctgcgacattcccagtacatcgattccgtttacaaaaactgtgactacatagggaagcaataacaggattgtcaaaaacgctcccgctgattttagtttttgatgttttatcttcataaaaaacctccatgatgcagtatatgcaccatggaggtctgatatccttttattcttctgcagatggtttgtcatctgttttcggttcttcttttgtcccgccatacgtatagctggaagtcatctgctcatgctccggtcttgacagttcttccaccctgcggtattctcccgggatgatctcttcgtctactttcttaaactctccgtctaccggatccgctgtattctgatcttctgcaggcgtttcctcctgcttcggcgcaggagcagccggtgcctcttccgatgtctgccggggcatctcaggtgccggcgcgatcggcggaggtgttgtcataaacggtgttcccagatccggttcttttcccggattatacggacgattccgcatcacaaacagacaaatggattcatacagcggaagtaatactcccagaaccgcatgtgcaactgccattcccggtgttgtaaatttctcataaatctgacggtttacaagaattcgaagcacactgtagactgcattgtacactgtaaaaaatacaatgacgataactgtcacgataatgattcctgtcactgcgccaaagctaaagccgccgtaagatgagaaaaccacaccaaatccaagcactacccatatgaccacatacaggataccggtaacgatggaagaaataaatggcagtacgatcagccagattcccggattcttgatctgtttatttttcagatgtaccgttccgccaagctctccctgaaggtacgttctggcaaatggtacaaacgccagccatggataatccattccttctctttttgccatattgtacattccgattccgcggaaaatatagtttacgaccgcaacggtcagtccaaccagtaatatgatcaggtaaaacatcaaaattcctgtcagaatacttcctcccacctcatgagtggacggagtattatagtaactaaagtcctcatatggcaattcactgtaaaattccataggcttcctcctattcttcgaccggctttacaaacaccttcttcagtttccagatatcatccacatactcttcaatcgttctgtcagaggtgaattttccactgctggcagtgttcatcatcgccattttggaccatctgtccttatctttatatgcttcttctactttcttctgtgcatctgcataggaacggaaatccttcagaataaagtatgtgtcaggtctgtctgtacactgtgtgttcagaagtgagttatacagatctttgtacatctcgtggtttccgtttgcataggttccatccatcagctgatctaccacacgcttgatctcccagtcattgaagtaaatctctgtcggattgtatccgccatgattttcatagttgataacttcttctgaactgagtccgaagataaatgcattttcaatgccgacttcatccacaatctctacgttggctccgtccatcgtacccaatgtcggcgcaccgttgagcatgaatttcatatttccggtaccggaagcttctttggaagctgtagaaatctgctcactgacatctgctgccgcaaataaaagctctgcgttggatacacggtaatcttcgataaatacaacttttaatttgccattgatgcttctgtcattattgactacatctgctacggagttgatcagtttgatcgtctcttttgcacgtttatatccggccgctgcttttgctccgaaaataaaggttctcggatagaagctcacctccggatgttctttgatctgattgtacagatacattacatgcatgatatttaacaactgacgtttgtactcatgaagacgttttacctgtacatcaaaaatggaattcggatctacttcaattccgttgtgttttttgatatacgctgccaaacggactttgttgcggtatttgatctccatgaactcttttctcgcctgctcatcatctacataggctttcagctttccgatctgggcaagatcagtgatccagccgtctccgatcttatccgtgatccagtctgcaagcagctgatttccgtgaagcaaaaatcttctctgcgtgattccattcgtcttgttattaaatttctccggcatcatctcatagaagtcttttaactcttggtgtttgaggatctccgtatggagctttgcaacaccattgacagaatatcctgcaatgatcgccatatgtgccattcttacctgaccatcatagagaattgccatcttgcgtaccttctcttcattcccaggatattttgcacgcacctcaatcaggaatcttctgtcaatctcctgtacgatctgataaatacgcggaagcagtctggagaacagatcaatcggccatttttccaaagcttctgacataatcgtatggttcgtatatgcacaggtctttgttgtcacatcccatgcttcctcccatgtgagcccttcctgatcgatgagaagacgcatcagctccggcactgccacggtcgggtgggtatcattcatctgaatcgctaccttttcgtagagtttacgcacatcactgtgtttctttttatacttttcaagcattgtctgcaagcttgcggaaataaagaaatactgctgtttcagacgaagctcttttcctgcatagtgattgtcattcggatacaatacatctacgatcagttttgcaagattctcctgctctacggatttgtgataatctcctctgtcaaatgcgtccagctggaaatctgtgatcgcctttgcatcccacacacgcagtgtattgactacgtgattaccgtatcccacgatcggcatatcatatgggattgcaagtacggattcataattttcctgtacaaagatatcttttcctgtctccggatctttgtcaaaatgtacatttcctccgaagcgcacttcttttgcatattcctcgcggcgcagctcaaacggatttccttctttgagccagttatcaggtgtctccacctgataaccattttctattttctgcttaaacattccatagcggtaacggattccacatccgtatgccggataattcaaagtggacaatgaatccagaaaacatgctgcaagtcttccgagtcctccgtttccaagtgctgcgtccggctcttcatcctcaacaacgttcagatcgatgtccatctcttccagtgcttctttgacctctttgtatgctgtcatattgatcaggttattgccaagcgcacgtcccatcagaaactccatggacatatagtagacggtctttgcatctgcttcatcataagccttctgcgtagcgatccagtcatccataataatatcttttacggcataggaaactgcctgaaatatctgctgtggagatgcttcagcaatatttttccgatacagagtccttacattttccctgactgcctctttaaatgtttccttttcaaaacgtttgctgtacatgtcgactatctcccttctttttcgactcccatgaaaacagcttctccattaatcttccattcttttacgaatccggccggctctgctttttctgcagaaactgccagaacctcagaacagatctgtgtaccgttcgctgcgaagactgcctctgccttttcgcttcctttgtaggtcactttgatcttatccatcacttcaaatccggcttcttttctcattgtctggatcttactgatgatctctcttacaaatccttcctccagaagctcttctgtcagatttgtatccagaacaactgtgattccattgtcattttcagaaacatatccttcaatctgtgcagtatcgattaacaaatcttctttgaacagtgttacttcctgtccgttaatatccagtttcagagaacctgtttcgttaatctcatccattgctgcattgccatcgagctggtctaacgcagctttgattccacccaacattttaccatattttggtccgactgtctttaactgtggtttaaaactataagaagtaaagtctcttacatcatctgtaaattttacattttttacattcaactcatctgccacgatctcctgataaaattccggcagatcgaatcctgctttcacgaacatctgtccgatcggctgacggtttttgatgttggatgcgttacggcatgcacggcccatgacaaccagttttaatacattgtccatatctgcttccagtttttcatcgatcagttcgttctgaacctccggataatcacaaaggtggatactttccggagcggatgcatcaacactcttcaccaggttctggtagatttcttctgtcatgaacgggatcatcggcgcagcaactttcgatactgtcacaagcgcagtgtacaatgtcatgtacgcattgatcttatcctgttccattccttttgcccagaaacgctcacggcttcttctgacataccagttactcatgtcatccacgaaatcctgcagtgctcttgcactttccggaattctgtagtttgccagatgctcatccactgtttttgtcagtgtattcagtttggacagaagccatttatccatgactcctaatttatcatattccagtgtatattttgttgcgtcaaatccatcaatatttgcatacagtacgaagaatgcgtatgtgttccacagagttcccatgaatttacgctgtccttctacaactgcttttccgtggaaacggtttggaagccatggtgcactgttgctgtagaagtaccagcggatcgcatctgctccgtatgtctccagtgcgtcaaatggatcgaccgcgtttcctttggacttactcatcttctgtccgttctcatcctgcacatgtccaagaacgataacattcttgtatggcgctttgttaaacagcaatgtagaaatcgcaagcagagagtagaaccatcctcttgtctggtctaccgcctcggaaataaagtctgccgggaactgctgtttgaacaaatcttcgttctcaaacggatagtggtgctgtgcaaacggcatggaaccactgtcaaaccagcagtcaatcacttccggtacacggtgcatctgttttccacactctggacaagtaatcgtcacatcgtcgatatatggacggtgcagttcgatatcatccggacagttatcagacatctcttttaattctgcaatgcttccaatagagtgcatatgtccgcattcacactcccagatattcagcggtgttccccagtaacggttacggctgattccccagtcctgaacattctcaagccagtctccgaaacgtccttttccaatactttccggaatccagttgatcgtgttgttatttgcgatcaggtcatcttttacagccgtcattttgatgaaccaggactcacgtgcgtagtagatcagcggagtatcacatctccagcagtgcggatagctgtgctcaaatttcggagcgtcaaagagaagtcctctctcatccagatctttgagtaccatcggatcggctttcttcacgaatactcctgcaaacggagtttctgcagccatatcacctttttcatcaacaagctgtacaaacgggagctcgtaatttcttccgacattcgcatcgtcctcaccaaatgcaggcgcaatgtgaaccactccggtaccgtctgtcagtgtaacgtaattatcacatgtcacataaaatgcttttttgtgctgtttctctgcactgtcagctgcacactggtacaatggctcatactctttgtattccagatcttttcctacatatgtctccagaacctcataagccggtgttccttcttctgcaagctttccaagaaccgtatcaagaagcgcctctgccatgtaatatacataaccgtctgctgcttttacttttacataagtctcacttggatttacacaaagcgccaggtttgacggcagtgtccaaggagttgttgtccatgccagaatgtatgcgtcttcgtcttttaccttaaatcttacgattgcggaacgctctttcacatccttgtatccctgtgccacttcctgtgcagacaacggagttccgcagcgagggcagtaaggtacaatcttaaatcctttgtagaggagctttttgtcccagatctgtttcaatgcccaccactcggattcgataaaattattgtcgtatgttacataaggatgctccatatctgcccagaatccaaccgtgctggagaaatcctcccacattcctttgtatttccatacgctctctttacatttgtcgataaacggctccaatccgtatccttcaatctgatcttttccgtccagaccaagcagcttttctacttccagctctaccggcagaccatgggtatcccatcctgctttacgaggaaccttatatcccttcattgtgcggtatctcgggatcatatctttgataacacgtgtcagaacgtgaccgatatgcggttttccgtttgctgtcggaggtccgtcgtaaaaggtgtattccggacatccttctttttcctccatacttttctggaagatatcatgctctttccagaatgcttcaacttctttttcacgtcctacgaaattcatatccgtggaaactttcttgtacatagcgcttttcctttctacttttcttttatttttctgagttactgtttatgctgtacaggaactgatgctgccttcgtttctatagtaaaaaaactttcgtcctgtaataggacgaaagtttaaaaatcttacgttaaccacctgttacaacatacttagatatcatattctgatatccgttatatgcgttcctttaacggcggaaccccgtcagcctttacttctcgcggttcaaggactgcagctcgaaagtgatcttcggaaaaatcctactgataccggccttccaccaccaccggctcgctgaaacgttcagaaagatcctactctctttgtcatcgctttttgatattaaaatacaaaattattataagaagaaaccagagaatagtcaagggatttcctgctactcttttactacatccattacaaattcactaaacttattttcaataatataatttctttatataataagaaacaaaaaaacaacaccaaccggtgctgcctctcattccatctgtatttcctataccttcaaaactgcatacaaagaatcatccatttcctatcaccttgcttggttatgccctcgacctattagtaacagtcagctccatgcgttaccgcacttccacctctgccctatctacctcgtcgtcttcaaggggtcttactaacttgacgttatgggatatctcatcttgaggggggcttcacgcttagatgccttcagcgtttatcccgtcccggcttggctactctgctatgcatttggtaatacaacagatccaccagcggccagtccaccccggtcctctcgtactaagggcagctcctctcaaatatcctacgcccacgccggatagggaccgaactgtctcacgacgttctgaacccagctcgcgtaccgctttaatgggcgaacagcccaacccttgggacctacttcagccccaggatgcgatgagccgacatcgaggtgccaaaccactccgtcgatgtgaactcttgggagtgataagcctgttatccccagggtagcttttatccgttgagcgatggcaatcccactttataccaccggatcactaagtcctactttcgtacctgctccacccgtcggtgtcgcagtcaagctcccttctgcctttgcactcttcgaatggtttccaaccattctgagggaacctttgagcgcctccgataccctttcggaggcgaccgccccagtcaaactccccacctgacattgtcccccagccggttcacggctgctggttagaaatccaatactacaagggtggtatcccaacagtgactccctgacaactggcgtcatcagttctcagtctcccacctatcctgtacatgcaatatcgaatcccagtatcaagctggagtaaagctccatggggtctttccgtcctggcgcaggtaaccagcatcttcactggtatttcaatttcaccgggtgcattgttgagacagtgcccaaatcattacgcctttcgtgcgggtcggaacttacccgacaaggaatttcgctaccttaggaccgttatagttacggccgccgtttactggggcttaagttcaaagcttcgccttacggctaacctctccccttaaccttccagcaccgggcaggcgtcagcccatatacctcacctttcggttttgcatagacctgtgtttttgctaaacagttgcttgggccaattctctgcggccacttttacatggcactccttctcccgaagttacggagtcattttgccgagttccttaacaatgcttctcccgtcggccttaggattctctcctcatccacctgtgtcggtttacggtacgggtatatcataaacaatagcggcttttcttggcagccagctcacatacttccggctttacgccccacatcacgtcttcagattgtacaccggatttgcctgatgtactcctacctcgcttgtaccggtttttccattcccggcttatgctctctgtctgcgtccccacagttctgttatgatacagtacaggaatctttacctgttatccatcgactacgtctttcgacctcgccttaggccccgacttacccagagcagatcagctttactctggaaaccttagatattcggccggaaggattctcaccttcctctcgctactcattccggcattctctcttcttaccaatccactgctccttccggtacagcttcgtctcggtaagaatgctcctctaccaattgacattcatcaattcctaagcttcggtagtgtgtttcagccccggacattttcggcgcaggacctctcgactagtgagctattacgcactcttttaatggatggctgcttctaagccaacatcctagttgtcttcgaaatcccacatccttttccacttaacacacattttgggaccttagctgtaggtctgggctctttcccttttgactacccaacttatctcggatagtctgactcccatgcaccatctacacggcattcggagtttgatatcccttggtaagctttgacgcccccttaggaattcagtgctctacctccgtaagacttgcatgaggctagccctaaagctatttcgaggagaaccagctatctccgggttcgattggaatttctcccctatccacacctcatccccacccttttcaacggatgtgggttcggtcctccattgccttttacggcaacttcaacctggacatggatagatcacccggtttcgggtctactccgactgactatttcgccctgttcagacttggtttcccttcggctccaggccttcagcccttaacctcgccagccagcgtaactcgccggaccgttctacaaaaagtacgcggttcatcatataaagatgttccacagcttgtaaacatatggtttcaggttctctttcactcccctcccggggtccttttcacctttccttcacagtactatgcgctatcggtcactaaggagtatttagccttacggggtggtccccgcgcgttcccacaaggtttcacgtgtctcgtggtactctggatcctgccatgcttgcttgcctttcgtgtacggggctttcaccctctctggctggctttcccaaaaccattctactaggctcactcgtcaattctgcagtccgaaccccggagtgcacgcactccggtttgggctcttccgcgttcgctcgccgctacttacggaatcacatgttgttttctcttcctccggctacttagatgtttcagttcaccgggttcccttccacagcttatggattgggctgtggatacttgaggttttctcaagtaggtttccccattcagagatctccggatcaatggatatttgctcctccccgaagcttttcgcagcttatcacgtctttcatcggctcttagtgccaaggcatccaccatacgctcttattagcataaccaactgataagaaacacgggttggtctctcatctacacatgtatagcgttacatgcgttggtaatagtttgtttttttataatgttgttaacattacctcggatgtcttgttgaattaattcaactctcttattttcataagatatttctctttgtatgcaattttcaaggtacaactgactgcttctttcatcagtcattagaaactaaaatcccttttaatctctaatcactggtgaaccccagttatctctaacagcacttccctgctgatcgggttggcggtgataagttgttgctcatccttgccggtatctatgcctaaagacttcgtgtggtcttttcacacgttagtcggttggtacttcagatttcttggtgaggtcctttcgaacctggatatctgaagtttcattccgaaacctgtcttttttcttttttagttttggcggccacctactctcccacaccgtctccagtgcagtaccatcggccgctcaggtcttaaccatcgtgttcgggatgggtacgggtgtttcccctgagcgcatcgccaccaaaaaggctgagttcttgagaaccctcataattaaacaatagctcttacttcctctacttctttctccttagaaaggaggtgatccagccgcaccttccgatacggctaccttgttacgacttcaccccagttatcggtcccaccttcggcagctccctccttgcggttgggtcactgacttcgggcgttactgactcccatggtgtgacgggcggtgtgtacaagacccgggaacgtattcaccgcgacattctgattcgcgattactagcgattccagcttcatgtagtcgagttgcagactacaatccgaactgagacgttatttttgggatttgctccccctcgcgggctcgcttccctttgtttacgccattgtagcacgtgtgtagccctggtcataaggggcatgatgatttgacgtcatccccaccttcctccaggttatccctggcagtctctctagagtgcccatccgaaatgctggctactaaagataggggttgcgctcgttgcgggacttaacccaacatctcacgacacgagctgacgacaaccatgcaccacctgtctcctctgtcccgaaggaaagctccgattaaagagcggtcagagggatgtcaagaccaggtaaggttcttcgcgttgcttcgaattaaaccacatgctccaccgcttgtgcgggtccccgtcaattcctttgagtttcattcttgcgaacgtactccccaggtggaatacttattgcgtttgctgcggcaccgaatggctttgccacccgacacctagtattcatcgtttacggcgtggactaccagggtatctaatcctgtttgctccccacgctttcgagcctcaacgtcagtcatcgtccagaaagccgccttcgccactggtgttcctcctaatatctacgcatttcaccgctacactaggaattccgctttcctctccgacactctagcctgacagttccaaatgcagtcccggggttgagccccgggctttcacatctggcttgccatgccgtctacgctccctttacacccagtaaatccggataacgcttgccccctacgtattaccgcggctgctggcacgtagttagccggggcttcttagtcaggtaccgtcattttcttccctgctgatagagctttacataccgaaatacttcatcgctcacgcggcgtcgctgcatcagggtttcccccattgtgcaatattccccactgctgcctcccgtaggagtttgggccgtgtctcagtcccaatgtggccggtcaccctctcaggtcggctactgatcgtcgccttggtaggccgttaccccaccaactagctaatcagacgcgggtccatctcataccaccggagtttttcacacggtaccatgcggtactgtgcgcttatgcggtattagcagccgtttccaactgttatccccctgtatgaggcaggttacccacgcgttactcacccgtccgccgctcagtcacaattgcttcaatccgaagaaatccgcaaaagtgcttcgctcgacttgcatgtgttaagcacgccgccagcgttcatcctgagccaggatcaaactctcgttaaaagtgttcgttccggtcagaattaactactagctaattcatcccttttactgtctgtcacattctcatgtgacgggtgcatctcttagatgctgttcttaaaaaatcttctcttaagaaattttcaaggttgttgtctattgtttaattatcaaggttcttcgctgttcttgttgataagaagtagctttgatattttatcacgccgttttctctttgtcaagaacttttttcattttctttttgctgtctgttccggaagtgtttctccctcacaagtcagctttaataggttatcacatccacttccttctgtcaagaacttttttcacgttgtccagcgatctgctctcgcatcctgtcccacagtggcccttgggcttattcttttcatcggtctgtctcagcgacaagtggtatcttatcacgggaaaagtgaattgtcaatgttttttctgttttttatttttttcgcacaattcagacaatttaatggttttttccatattaaaagaaagaaggacatcacttctgaaagcaacgtccttcctctgttaaaataacgatgtaatagattgaattaaattaggaatctgggttttcaatgctgagaatgtcataaacagtacaaaaatatagctgattgtcatacagattctcaatgctgtcggcttcttatatccttcgtttacatcttttctccataaaaggagcagaataaacaaacctgctaccggtgtagcgatcgaggttgcgacatttgccatcaggatcagctgtgttggagatccgccatagctatagcaaatgatcatcgtcacgatcaggcagatcagacagcctacgcggattgcttttgactccagtgcggtatctttatcaaatcctgcgctcaacaacaccatacctcgctgtgtgtttcctaataaagaagagaatcctgcgcctaacagcgccactcccataatatacttcgctgcatttcccatgatcggaaccagcatttccgccaattgagcaggcgctgtaattttctgtcctgtaggatgcagtacgatcgcacctaccaggataatagagcctgtgatcagcacaacactgataatatggatcactgcatctgtcagcattacgccgttaaacaaatcttcttttttccactttttctcttttcccagatatgtactgtaaattccggttgttactgctgcgtttgtagaaatgaatgccaatgctgtcgccagtccgcctgccggaatctgaaaactgacaaatgccttgccggtctctccccagtccgggcctccgactccgatcaacgttgcataaaacgctacgatcatacccaaaatgcacgccgtaataattttttctacttttgaatatacattttttgtgaaatagcagtaaattacaaccgctatcatcaatgcagaacctactttccagttaagtccggtaatcaaattcacaccggcgccggttcctgagatgttccccattgtaaaaaagagacatgccataaacaacgcaattcctacaaatcctgctgccacaggtccataatatttacggattgcatgaatggtcggtattcccgtcacgatcgccagccggtttgtcaccatcataaatgtaattcccataaaaacaatcggtatgatcagccagatcagcgtatatccgaaattgctgcccagcatcgctgctgtggtgatcaccccggggccgatcacaattcccgttgcgatcaaccccggtccaattctttttatcagatcctttaatggaagccgttcaacatttgccccaaacacttctgttgtcttgttttccataaagccacttctttctctgatccctctttatttgtattgttccatatctacttttggaagctgactgcgttccagtcctaaagaaacccagtctttttcttcctgattcagaggaagtaccggttttctcatcaatgcatttgagaagattcctctctgatataatgcttcttttaatctggcatgtgcttcaccggatggctgtccgcctccataaattgcctgtgaaatatgataaatacggtctgaccagtcctgtgcttcttttaatgtatgtttgtcaggatttgcaaatacttctcttgccgggcagatgatttccggtacacagcctgcaaatccgatcagcgctccgtccattcctgggaaccagcttacacacaatgtttcatcatgacatgtgatcagggaaatatccggacattcctggcgaagcagacgtacatcatgttcatagatagaagtcactcgtgttcccattttgatacatttcacatgatcaatctctttgcacattttgatcaaagtctctaccggatagaatgctttgcttgttgccggatacagatgaatgatgatatcgatatctgcgccttctgccacatcttttacatattcaaacggtgcatccggattcattccaaatctcagccacatatgaggaggcatcagaaggattccatctgcgcctgcttcttttgcttcttttgccatttcgatgctttctgctgtgttttcacagtttacaccagaaatgatcgtcatcacatctccacattcctctgcacagatctcaacaacgcgttttctttctgctcttgtcagtcctgtgatctctcctgtatgtccgttacatacaagaccgtccattccttttccgtaaaaactcttgatccatcttaaatatgctctgaattctggttcgttgatggaataatcctcattgagcggtactgaaactgccgggaaaattgttttaaaattttttacttttgccattgttaaaatctcctttactttacatttcatgattattttcagggttcaaagatcctgcgcctgaatcttttgtatgtgtcagcaaacgtttgcatatctgttagtctttatatatcatatctttgaaatcaccgtcaacgaaatggactccctctgcaagaagttgcatataccatgcaattttttgcatattttctatatatcccctccctttttctttgatttttcaactatttgacggaatttattttttgagataaaatggttgcattaaaatcatatgcaatcgtttgtatcgaacagactcataaaggaggcaatcatggcaacattaaaagatgtcgcaaaacttgcatgtgtagatgtcagtaccgtatcacgtgctctgaataatacttcttatgtccaccctgacacaaaagcccgtatcctggcggcagtcaaagaactgagttatcagccgaacgttcttgccaaaggactgcgtcagggcaaacgccacaccatcgggatcgtcgtccccagattatccatgactgtatttgcagaactgatccaggggattgatgaagaagcccgttaccacggatattctattttagtttgtacgactgaagatgatccggatgtagagagagaatgtctgaatcgattgagaaatggatttgtagacggcatcattatcgccggaaccggaaaatgcggacgcctgatccgggatatccacgccagcgggatttctgtcgtacagatcatccgaaagcaggaatcccatttaagcagtgtgatcgctaattataagcaatccgcgtatcgtgccgtaaaataccttgccgggaaaggctgtaaagaaatcgggctgatcaatggtcctatgtccctttccacttattatgaacgatatcagggatataaaaaagccatctctgaactcggtctgaaagaaatccgcccggagtccacacaacaggcaaacacttttgagtacggctttcagtgcgcggaattcttattgaccaactactttcacctggatgcaatcatcacatccgtagatattcagggaatcggagctttgcgggcggtcaaagaacaggcgatgctggttccggaagatatccgtctgatcagcctgaccggacattcgatcggaggaatgttggaaacaaccatgacatctcttgaaattcctgcgcatgaaatggggaaaaaggctgcgcttatggccattgaagaaattgatgccccctccgatcaaaaaccaagtcctcagcaccttgtttttgaagctacacttgtagaacgggaaagttcctgattgtaaaaaatggttcaaaaaatggagactgccttttaagacaatctccatttttattatgccacactgccatttcggtatctgtccgtctggccgcatgctgcttcaaactcttttaacttttgttttgcttccggattcagatatttcggcacctcgatctgcactgttacgtattgatccccatgtgcggaagtgtttttcatagatacgattccttttccacgaagacggatcttcgttccggactgcgtccccggtcgaattttacacattacatttccatataatgtagtaaccagaacttccccgccaaaaactgctgttgtaaatggaatatttacttttgtatacaaatcctgcccgttcctctcgtatcccggcttatctcctacctttactttcagaagaagatctcctgcctctcccccattgcttcccggcattccttttccacggagtcttacactttttcctgtttcaatgcccgccggtatatgaacctgcagagattgtgtgcttcctctgccgtccggactctggagatgaatcactttatcacatccaaatgcagcttcttcaaaagtaatcgaaacttctgctcttaagtcttggccttttctcacaaactgactgctgtcaaacccctgcctgtaaaatccatttttgccaaatcctccgctttcaaatccactgttttggaaaccgccggactgtctgccgtgaaaaatatgatcaaacatatctccaaaaatatcgtccatatttccgctctcaaaatggtactcctgatagcctcctcctgcattttcaaaaggattaccgtgcggattctgtcctgccccgctgccatcaaatgcggaatgtccaaactgatcgtatagccttttcttttccggatcacttaaaatcgtatatgcttctgtcacttcttcaaatgatttctctgcctgtttatctcctggattggtatccggatgatattttttcgccaatttccggtatgcttttttaattgttcctgcatctgcatttctgctgactccgagcacttcataataatctctttttgctgccatcctttcttcacctcctgttcaaaaaaaatccccgggatcacaatcccggggaaaataccttttatccttctattgttacatatcgtttttcatccacaggtttcttttcctcttttttcgggatatcaagcatcagaataccattttcaaattttgcatgaatatcggtctctgtgatatcctctccaacatagaaacttcggctcatgtttcctgcataacgctctcttctaatgtaggtaccattcttatcctgctcatctttatcgagacctcttgctgcactgatggtcaaatatccgtctttcagttccgctttcacctcgtcttttttaaatcccggcagatcgatcgctacttcatagccatgttctgtctctttgacatcggttttcatcatacgatctgcacgtttgccatacaatttcttgtcaatatccggaaatgaaaaatccatccaatcgttaaataagttttctccaaaaatactaggcatcatcataagtcatatctccttcctactatacaatcatctatgtaaagcacaaccggacgatccggagtgttgattactttttgatgaatccttgttacctttgttctatttgtaatatagcatctattgttggcactgtcaagaggtgagtgctaattttttttgtgaagccttgattttacgggcttgacagggatttttcacttactttcgcactcgattttcttggtttgaccacatttttacgacaaattcttggaaaaatatattcgtctgattttcttaccacattttacgacaacagcttatggtttataccacagcaggtacagttcccggcagattcattttagacatctcattctccacgtgagacttctctgcaatatgattgtagacattcattgtgatctgtgcatctgaatggcccataacatactgtataactttgggattgacattgttctcacccagtctggtacatcccgtatgacgaagggtatgcgatgaaataggaggcatcagctccggatctcgcttctcttcttctgccagtttgctttctttcttattataggcattgacaatatttttcagaaagctgttcactcccgccggcatgatcggacgtccatgcttggtattgaagatgaatccactgcgtccaccgatctccacattactctgcaaaccaagcatcaggttcagctctctctgtttacggaacgcatcatataccatctgtgtcataggaatgtctctgattcctgcatccgttttggtttctgaatcatggaaacaatatccttcattaccttcataatacacaagctgtccacctacatgaatctcccggttcttcatatccacatctgaccaggttaagccgatggtttcactcactctcaggcaagccccaaacataacctgcatcattggaagatgaggcttatacacattactctgttcaacaaacttcagaagtttttcctgctgttccagtgtcagtgcttctttctcctttgccggagccccataatctccaagtgttcctgttaccggattcttgcggataatcccatcttccactgccagttcaaaactaggattcaataagccataaagacctttgatcgtactgtgtgccagtccttcatctgacaatgcggaaaagaacgtccttacgtgagatgtcttaaaatccacaacacgaatatttcccaaagtatttcgtatacggtagtcccacatacggatataattctttttcatttctctttctttttcaaaccagccctgccttgtggcagaagctccgactcgtaacaactaaattgacacaatcagcttaatctgcgaatcagtttcaggattctgtctgcacaaagacggatttccttttctgtaagttttccttctttatacgcatcacgaatgtttttatcatcatccggattccccggcataataatatcatttcctgctgccacacaaacccacggaatgcttccatcctccggtactgttgtattccagtcagacattataactccgtcaaatccccactcttcacgtgcaatccttgtacaaaggtccttgctgtttgctgcatgcacaccattgatcagattataggaagacatgattgcagttggtgcgccctctttcactgcaatttcaaaacctctgagataaatttctctcaatgttctttctgatatgtgtgcatcaacccccattctgttatcttcctgattattgcatgcaaaatgcttgattgtaacaccacatcccggtctgctctgaactcctctggtcactgctgctgccagtgtgcctgcaaggaatggatcttctgaataatattcaaagtttcttccacacagcggatttctgtgaatattcaatcccggtgcaagccagagattaatatgaaattcttccatctctgccgcaaccttccgtccaaactgttccatcagttttttgttccaggactgtgcaagtgctgttcctaccggaaatgcagtacaatactgatagtaacgttctgcgccctcatggtcttttcttccaacaagataaccattttcaagtgaaccaagcacacctgttccataaactgtatctttctcacggtctacttcataagtttgctgcaggcggattccggccggtccgtctgccatgatcaaagatgggattccgtattgatcaaacagtgcttcactcgtctctcctgctgttcccggcactttaattccagatgctccaagtgtacttctgatttcagacatatttccatacagaagtgggatcaaatcttctacaggaatctccgtttcttctgaaaatctgcatactttcttttcttctgactctggttcaaatgatacgttcggaagttcctcaagtagtgctgtccattcttctgcgcgtctgcataattcttctgcacagtctttgatttcaacgacttcactatgatcttccagtttctttgttttctccatcattacatcagcagatacctttacccccgctgaaagttttgcctctgacaagctgtttccaatccatattccataagcacctgcctggattctccactcctgctgctcttccaaaaagcttgcgaacgcctttgcaggaagaacaatattcagtatctctttctctcccggtttcagttcttctgtcttttcatatccgaccagacgacggaattcttttctgcttccatcctgaggaagagaagcataaatctgcacaacttcttttccgctgtatgttgttcctgtgttttctacctcaacagttactgtcacacctttcgaagcagtatttataccgcaaagtcgaatgtcaaattctgtataagacagaccataaccaaatgaaaataatggttcaattccaaagctgtcaaaatagcggtatccaacatagattccttccgcatattcttccgtctcaagatttccgttcaaatagctgaactcctctgctgccggacaatcatcgtagcgttttgtccatgttgttgtcagctttccactcggtgtaaattctccaaacaatatatcagcaactgcatttccaccttcctgtccaagctgggaaatattcaggatcgcacatatattttctgttccagccagcaggtctgtaagttctaccggtccacctgcattaatgatcaatacagttgggattttctgctcattcaggaaatacagatctttttcttcctgatcactcagataataatccccttttctttttcttctgtcctttccctcgccggaaatacggcttacaatataaactacggcgtctgcatccttgatgtcttcatttgtcaccgcacggccatccggcatggcaaatggattggcagcataggcatcaaacggattgtctacatgttttgcagcttctaagatctgctccttccactctgttctcgcctgctcataacggttgtgataatctttcagccactcctcgcttacaatatcagcgtttttttctttcattccggcatatatagatacactttctctgttatttacatctccggaaccagtaccacctttgatcgtcttctctgccccaattcccaaaagtgcaatctttgtatctttttttaatggaagaagtccttcatttttcaacaggacaattccttcttctgctgcctcacgcgcaaacactgcatgatctatttcacgctggcaaacttctgtacttcttgttccactatgtttcaaatttgtttccatttacacatctccttaaataaaccaactgtaagaaaaaagctgcccactaaatgacagccttcctccaacaacttaattcttattattcttttactccaccaagagtaactcctgcaataatatatttagacaacagcaggtatataataatgatcggcacgattgctactgtgatcatcatatagattttacccatatcaaagttcatatagtctgctccacgaagtgttgcgatcaggatcgggactgtcatcttattctttgactgaatgatcaaagccggaacgaagtaattgttccaggaaccaacgaaagtaaagattgcctgaactgcaattgccggcttcatgattggaagaacaatgtggttaaatgtcttaaattctccagatccatctattcttgccgcttctacaagagaaatcggaagggaagactgcagataactgtacatgaaataaaatacagccggtgatgcaattgatggaatgatcaatggaagcagagaatcatacattcccatgttcgtaaccaatttcaggaatcccattgctgtaacctgtgtaggcataacaaggattgccataataaatgtaaatgctacttttttccctttaaaatcataagcataaagtccatatgctgtcagagctgaaaaataggtacataatgctgctgaacaccctgatacgatcaagctgttcaaaataccacggaacatcgggaagcttccgtcattcgccacattttttagatttgtaaagaaatattttcccggcagtgctgagaatcccttctgcagatctgcatgagaacgtgttgcatttataatcaacacatagaagaaaaacagacacataaaagataacagaatcaatacggtatgtgccagtatgctacgtccacgacttgacttcgtttttgatttcattatctctttctcctttctgcttttgctcttttcttagctgctttcttagaaccatccggatcgttatcatttgtcatacgatatacaaagaaacagaggattgcacttacgacaaacagatatacagaaagtgcaccggccattccatagtttttgctcttcagatgactgttcaggaacatgatcagagtcatggatgttctgttcgggttaccctgtccatttgtcaggatctgaggaacatcgaacatctgaagtccgccaataatggatgtgatcaatgtatatgccagaattggacggatcaaaggcagtgtaatatagaagaatctctggatactgttacatccatccaggtcagatgcctcgaagacgtcctgactgattcccatgattgctgccatcaacataatagttgtatttccaaaccacatcaggaagttcataaatccgatcaacgatcttgttccaaatacagatccaaggaaatcgatcggttttttcaggattccgattgacatcagaattgagttaatcggtccatttgttgagaacattgtaaagaataacaatgcaaatgcagatgccataatcaggtttggaagataaatgacaactttgaaaaactgctgccctctaatctttaatcggacatcagtgaaccacgctgcaagtaccagcgcgatcacaatctgaggtataaatccgatcatccacagaattaaagtattcgctccatatttcagcatatctgaatgaagaagactcacatagttttccattcctataaaattcggtccaacctctttaattcctgatcggtaatattcaaagaaactataccttactgtatcgatcaacggtatcaatgagaaaataatgtatgttacgaaaaaaggaagaataaatatatatccccattttccataatcaatactttttttctttttcttcataatggttcttcctttccacaatatcttctaacagaacagaggctctgctgtcacagagctccctgcgttagtatctgttcattccagacattattctggccaaacaacctctgtaatgtcaggataacgttctttaattgctgtttcaaagtttgattttgctttctcaaagtcaacttcgccctggaagtaatcgctgaatgagttctggagcaactccacacatccctgatcgtaagcggaaagtggtgcgatcttgatgttttcagcaactggtgcaaaatactggaatgggttctgtccgccaaggaattctgaaccatatgtagcatcatcgtttgctgcttcctgcataccggattttgtatttgtaaagtctgagtaatcctgggagatctttaacagattatctttttttgctgtcacagcaaggataatgtcttttgcatgttccggattatctgtacctgttgcaacatggatgtaagatcctccccagttgtattcctgcggtgggtttgttactgcccatacgccgtcttctccatcccagttcggtttcagtgtgaaatcaataccccatgccgggaagaggaatgcaaatactttggactgacttcccattgctttgttccagtcatcattccactgaccttttactgtcgggtttaagtaacctgcatccagccattcttttgaatcattaatccactgcatgatcattggatcaactgtaacctttgtgtctccatcttttacccatgaatcagaaatgttgtttccatagagacggaatgtatcagcataagaagcaaatgcataatatcctttctgcttcagttcttctgctgtctgtttcatagtatcccagtcttttactttttcacctacagcagtcggatcgtctgttccgaatacctcttttgcaatatcacgacggtaaaccattgttcccggacagcactgccatgtagatcctctctgaactccgtctgcatcagatgctgttgttcttgtgaagtcgtactgatctgcaagatctttatccggatcaattccaagatccttcagtggcattgcagcgtctgcttcagcatctgtatatttgtatacatagtctgtctctgacaggaagatatctactttatcatctgtatcagcatctgcctgtttcataagtgcctcatcaagtttctgctgataaacaccatcctgatttggattgatgatccagtggatctctgttccatctttcaatgttgtaacagttccatctttggatgttgactcaacttcaggatatacagcttccagtctctcacgaaactcatcattccaagaataaatgttaattacctttccttcttctgtactggcctctccgccattttcccctttgcttccacatccggcaagtaatccaacagcaactactgttgtcataagaatcgcgacaactctctttttcatttataaatcctcctttatctaagcactctgctatgcttttcttgttgttgaactaaatataccatctttttttctccgattatattatttatcttaacaaaatgtcaaattcgtgtcataatataaaaaaggaggttttttatggctttatctaatgaatggtacaatgcagaactcgaaaacagcgaattagaaacgcttcacagatcaccaactgtagaatattctttctataatgctgtacgctccggcgacatggaagcagtcataaaaaactgttccgaagatgaatttattcgcctggaaggaacaggcgttctgtcccgtaatgcgcttactaatataaaataccactttgttgtcactgctgcaatgttgacccgttattgtatcgacggtgggctcgaaccagagcaggcttacaggctcagcgacttctatattctgaagatggattcctgcacaacgatccgtcaggttgcagatcttcaccatgagatggcaaaggattttacaggtaagatgattcttcagaaaaagagttccattttatcaaaacccgttatgcaatgtgttgattatatttacagtcacatcaaagaaagaatcacgattcaggttcttgctgaccacaccgaactttccacgaattatctttcacgcattttcaagcagaatctgggagtctctgtcagcgattatatccgtgagcagaagatagaaaaagcaactcatctgctgcgatactcagataaatcaattgtagatatcgcaaattatcttgctttttcttcacagagtcacttcatccagacattcgagagctttaccggactcaccccaaagaagtaccgggacaaatactataaaagcatgtggtaacatcagatttcttctcagaagaattctcagattttcccacaaaaaatactgtcagaaagcaattctctttctgacagtatttttatctttttttaatctgtcgattatactaattcaatttcaatcttatgtgtctctttcgctgaaagcatctgaatctctctctttgaaagtattgtacacctttcagctgttatttctaatgcttttccatcgcaagctgcttttcggatcttcaactgattaaattctttcttttctttattatagaatataatctcaaagttccttccggcaaatgtcatcttaagtactgcttttccatcctgattatactgttccggcataagtgcaggtgcgatcttcaagtcaccgcaatctcctttcaccccaaacacttctgtgatcatggtaagcatataccagcttgcagcgcctgtcagatatgcatagaggcctcttccctgattatcaaaatattccggaagtccaggatacatcttactgttatcaaattccattgctgcatctaaaagtgcctgaagtactttatttccttcttttgcaaatcctctctggtacaatgcatttgagtacataacagccatgtgtgagaacactgctccattctctttctctccataagcaaatccaaacattcttccaagatcaaatttttcctcatggaagtttgtgttcaaacggtatccgccggctttctgatcataaagatacttgtctgcacttctgcagatagattccacctgatcttctgttgccgttccactcataatggcaaatacttgtccggtcagcatcattctcacgctttcatccataacgccttctacttttctgccatggttatcataatagccattgaaccagccatcttctccatccttcacccattcgttggcacggatgtttttcatcatccagtctgcttttccctcaagattagcagcaagttgatccagtcttacaacaattgtgtctccactgatattatgttcacatttctttgcgtatcctgcaaggagtgcctgcttacgtgctgcatcttcatacagttccacgcttcctgcaagaagatcttccatctcatgtgcaatttcaatcttgctgcttccactgatttcttccaactgacggagtgtttttgcaatatttctcaaatttccggcataagcacaggtaaatgcaacactttcacccttctcccatgccatgtccagtgcatcattccagtcggcaccatgaagacgcatttcattatgctctcctacatcatagaacgcacacagattctgtaaaagaatatgctccaaaactgttccgaaataaatgtggtctctttctgttttctgcttctgtccatattcgctgttccaaaacttatcatgtgcagtacctctcatagactgcaaatctttaaaatacggaaccttttcaaacagaacctccatatctcctgtctgatccagatacagacgagtcgttacaaatggccagaatgcatgatccatccagacacgtgtaatattgtttctgtctgcaataaactcaccctgcttatttccgatgattgtcgcatttgttccatcaattcttactccgccataattatccacgatcatctgacggacgtttgagggattcataatcagaagtgcaaggcaatcctgccagagatctctccagcctcttcctccttttccataatcgtgatatggaaggaaggaacatccataaattcttcttaaaattggctggaagcaaatccacttcagataattgtctgtagcttcatcaccggtttcaaactctacatttactttttctgtccaatactttttcactttggcaagctcgttttccgcttgctccttcgtaccaaataaagtgcagatttttgaaatggaagccttttctcccgttgctccggcaagaacaacatactctattgattcatttgcttttaattttctgcgttcaaacctgaatgccccaacagcctctttcccctccagatggcagcctgcggtacatccctttttttctacacgtactgcttccggaatcaggaaagaacctccctctccaataaagctttcaacagtcggataaaactccttcggggcatttccttctgctgtaaaaccatatacaaaataagtcgtatcatttttctgatgtccacgctcatcaaaggataataccggtgtaacttctacgccacattctttcgtgtcgattctgtgaagaagtgatgtaacatgtctgtggtcgcggatattgtctgcgcttcttccataaaccggaatggcaacgatcggtgttacttcctgttcttcttccgaaagatttgtaatcttgatcagctggatctctgttgtgccatcaatagaaacaaaggatgtgatctctgactgaagatgatatttttttgaagttcttgtcaacttctgccacatcatgcctgcttccagagtgctttcatcctgtctgtctgtatatttatcaaactcctgctccgctgaaactccacatgctgaccagtagccttttccttctacccgacaccagaaatttctggtgccacggttattgtgaaggttttcaatgctgacaggttcgagaaggaaatgattctggtccgttttactatctccccccaaagttggtgtaatactggatttcagaccttcttcccctgccagtggtaagtaaagtccactataattttccggatttgtaatcgtaaatgttccgtttttatctgtaaaattgatttttctcatgtccagtccctcgtcatttcatttaagaaaggaataattctacctctgttgtctttgttaacttctcctgtggaatataattatctttcatttgttctccatttacgaaaagtttttcacatcctgactctgcatgccccggatttttcacaacgatatgtaaatgtgaacctctgaaatctttttcgatttcaaattcctcccactctttcggtactgacggagcaatcttcagtccatagaagtctggccgcattccgagaattccttctacacatcccaccataaccgtagatgctgttcctgtcagccagtgtacatgagaacggccgaagttcgggctgtgttttccttctgtaaactgtccatagcagtatggttcaagtcttctgatctctgcacgattattctgtgcagccggtgcattttcaataaaatagttaaatgctctctctccgtgtccacgaagcgcctctgcaagaatgatccatccctgagactgtgagaaaattcctgcattttcctttgttccggcattgtagatcacagccagtgcaccgtcaaatgcatgtgcatgatacggaggatccatcaggattgcaccatattctgtattcagtttgtcatatacattctgaagtgcaagatctgcctgcgcttcatttgcaagcccactgatcacagaccagctctgtgggttcagccacatatttgcctccggatctgtgcgctgtccgatcacttcaccatcctctgtgaagccacggataaagcggtcttcgttccaacagagatcctggatcagtttttccagcttcttctgactttcctccagataattcagatattctgtgtctttcttatactcagcaaattccttcaaaattgtcattgcatagtagaactgtaatgcaacgaaggttgactctccatcttttccgagtcttaagcagtcattccagtcagcataaaggcctgccggcataccatgctttccaagatgattcatggagaaatctactgcacgtttcaaatgctcgtacacggtaccttcttctttatttgcaaacggaatcacttcatcgataaattccagatttcccgtctctgaaatgtatttgtatactgtcgggaacagccacagcgcatcatctgcacgataagccgggtgtcctgtctcctgcacataagaagcatcatccggtgtatcctcatgtcccggattgtgtgtgaattttacaagtggaagccctccaccattatttacttgtgcagaaagcatgaagcggatcttctctactgccatctccggtgccagatggatcacaccctggatatcctgtactgtgtcacgataaccgtatccatttctcagtccacaatatgtaaaggatgcagcacgtgaccagataaatgtcataaagcagttatatgcattccatgtattgatcattatattaaattcttcgcttggtgtcttcacctggaaatgggacagatgtccatgccagtactggattaattcttccagttcatttctgcagatcgtttcacaatcctcataacgagacacgattgtttctgcatcaacatcttctttcataccaacaagaaatgctatttcttttgtctctcccggatataaagtcaggattgtagctaatgctccacatccattttcattataatttccttcacaatttaaaataccatcttccactccgaccggattgttgtatccatgatatcttccaaggaaaccttccctgcttccacaccaggaatcaacctttgcacctgcaagtccgaagaaacggtcaacaacgatcttgtcatccacatcttttccatcttccagctgatccagattggcatggatcatctgccgcacacggtttccacggaacactgttcttgtaatgaactgagagtactgaagatttacctgatcctgctcgtaattgctgttgtttgtaaattctgcatagcctgttacattgatcttgcgcatgcgatccgaggtatttgtcactgcaagattccacacttcataagactgattcagcggaacatagtatcttacttctgaatggatctcgctataatcagccatcatctttgtgtatgctgtaccatgatgacattcactcttataagaattcagatcttttcctaccggctgccaggaagctgaccaataatcttcactctcctgatctcttaagtagatatatcttcccggctggtcaaactgattgaagacatatcttaaaattcttccgttcgctcctgattttgcaaagctatatccacctgcattattagaaataattgctccatattctggagatccaagatagttcacccaaggtgccggtgtatccggtcttgtgatcacatattcttttttcgattcgtcaaaaaaaccatatttcatacttcacattctcctatcacacttattataaacaaattgcagccattcctactatctgcaattctatctttactgtgataaaagaatatcaaatcagaacacattaatatacaaaataagaacttaaaatatcaaattcgtgacatgacaaaaaggaatttaccatatctggttttcctattttctgatgtccggagatagaaatttcctatgacctgattgtcccaaattggactatccgctcttaggcacttctcttctccacttaatcattttcttctcctaatggaacttcccggataatagacctttcgctttcaatgtcagattcttattcttgaaatggtgattactcattaccgtaaaattcttagttctctctacacgaaaaatctgtgccatgctccatcctccttttcagttcaaaagaaaaagcgtaagtaatatctctatcactcacgccttctctaaacattttattcttttttcaataaatttttaatctgtccaattacctgttcaatcctcagttaccagcttcaactttgttaaacatagatcagttcattcaaaataatctcttccgcaatcgctctgtgctgattagcagttcttacccaggcaatctgatttttctctttatccggtaatggttctttttcttccaactgcttcatgataatttcttcccgttccctggctgccttgtctacttccagcagatgctcactaatactatcctgcaggagcatcacctgatacagcgaatttctatgattcttcaaataatctctgcgtaaaaatccatatttgccaagttgttccatctgctcaccggatttataggtgagattgggaatcagatatccattcacatttgtataagtcagtttcattttattagcactctccttttttctttgattttttacaccaaatttacaccatttgcaattcatttgacgctattctacgataccagacaaaatgtctgatcactccgaaagcctgtaaaacaggcatttctgagatacacaagacaggacaaaaatcgacttccattatcaagaggtgagtctaattttttatattttttctttcttgacaatcactccccctctctgttatgataataaaactgcaataagggagtagttagctctgtacagagtcgctgtgtcaacatattgatggttttccatctggtacagcgttcaataacgagacttattcacgtgatatttttgcgtggataagtctcgttttttatgaaggaggagaaaaaatgagcttattttctgtatttctgatcggaatcggcctttccatggatgcatgtgccgtatcctttgcaaaaggaatctgtctgaaaaaacaagtcaaaacttatgccttgaaactggggctcgcctttggatttttccaggcaatgatgccgctgatcggctggtgggtaggaacctattttgagtcctttatcacagctgtagatcactggattgcatttttcctgcttggttttatcggggtcaatatgattcgggaatcaaaagaagctgcatcggaatgtgatacttcgatcgagtccattccgacaaaagatatttttctgcttgcgatcgctaccagtattgacgctttggccgtgggtatcagctttgcatttctaaaagtagatatcctttctgccgtctgtctgatcggtgtcactacttttttcatcagcgcagctgctgtatttctcggaaataaaattggcggaaaacttggaaaatacgcagagatcaccggtggtgtcatactgatcctcatcggtctgaaaattctgatcgagcatttatttggattgtaatatagaaaaaaccggaaagaatttccatacactggaattccttccggttctttttatatgcagtcaactgctacagcagcccggcaatctgataaacaacgaatgcaacaacccatgcgatcaggcactgtccgaataccattgctgctgcccattttccgcccaattcctgtttcacagacgcgattgctgcgacacatggcgtataaagcaggcagaatacgagaagtgctactgcccctgcaatggtaagactgccctgaagtgctgcactgcttccaaacaaaatagtcaaagacgatacaacgctttcttttgccagaaatcccgaaatcagcgcggtcacgatacgccagtctccaaatcctacaggaaggaaaatcggcgcaagtccgcctgccaccaatgccagaatactgttttgagaatctgctgtcatattcagtccggtatcaaaattctgcaaaaaccagattacgatcgtagcaataaaaataacggtaaacgctctctgcagaaaatcctttgctttatcccacaaaagatgtcccacatttttggcacccggcagacgatagttcggcagctccatcacaaacggaaccgcttcccctttgaatgccgttttcttaaagatcagtgccattaaaattcccatcacaattccaaatacataaagtccaatcatcacaagcgctcccctcttcgggaaaaatgccgcagtgaaaaatgcgtaaatcggcagcttcgccgtacagctcatgaacggagtcagaagaattgtcatctttcggtctctctcagacggcagcgtccggcttgccatcacaccaggaactgtacatccgaatccgaccagcatcggaacaatgcttcgtccggagagtcccagttttcggagaagtttatccatgataaaagctactcttgccatatatccactgtcttccagaagcgacagaaagaaaaacagtgtcacaatgatcggcagaaaacttaaaacaccgccgactccactgaaaattccatcaatcaccagcgaatgtaccacactgtttacatgcgctgctgtcattgcatggtccacgacatccgtcagtgctgtgattccagactccagaagcccctgcaaaaatgctccgattacattgaaagtaagccagaatacaactgccataattccaacaaatgcaggaattccggtatattttccagtcaggaaccgatcgattttccgacttctgagatgttctctgctctctttcggcttgatcactgactcactgcagacatcttcaatgtaagcaaacctcatctgtgcaattgcggctgcacggtccagtccggtttcctcctccgtctgtcgggaaatatcctccagaaggtttttctcattttctgtcagattcagctgctctaatattttttcatcaccttccatgatcttgcttgccgcaaaccgaaccggtatctctgctttttcagcatgatcctcgatcagatgcattactgcatgaattcctctgtgaaccccttcctcttttcggcagaaatctgtttccagtggtttttcctgatattttgctacatggatggcatgctggatcaactcctcaattccttctgcctttgccgcagaaatcggaatgaccggcactcccaaggcctcctccatttcattaaccagaacggaacctccgttttcacgcagttcatccatcatattcaatgcaacaaccatcggaaaaccaagctctaacagctgcatggtaagatacagatttcgctcaatatttgttgcatccacaatattgatgatccctttcggtttctcacgaatgacaaactctctcgtcacgatttcctcactgctgtaaggagacatcgaataaatccccggcagatctgtgatcagtgtattattatggcctttgatcactccatcttttctgtctactgtaactcccggaaagttacccacatgctgtttggaaccggtcaactggttaaacaatgtcgtctttccacaattctgatttcccacaagagcaaacgtcagtgtctccccttcaggcagcggagtctcctctttccggttatgaaactttccgccttccccgtatcccggatgcagtttctcctgtttttctactttttttctgatattctttggtttgtgttctttactgatttcaatgttttttgcatctttcaggcgaatcgtcagctcgtagccatgaagccgcagctcaattggatctcccatcggtgcatattgtacaaccgtcacttctgtgccttgtatcaatcccatatccagaaaatgttggcgcagagcgccctctcccccaaccgaaagaatggtggcagtacttcctatttgtaattcatttaatttcatgtcttttcctctttctcattcgtttgagctttcttactactctaccatacactgatgtttttataaaatcaactgtttgggcacaaaaataccgacagattactccgccggccttctattattttaagattgcttctacatctcctgcaatctgctctgcattcagatgatttttctccaatacttcctgcacgtcatatcggtcaaggagctctttcttcaatccaaagtttaacactttcatatcagaaacaccgtaataacgggcaatcttttcaccaaaacctccgtctaaaattccatcctccagggtcactacgatttcatgatctttcttcagatcatcaagaagtgcttcatccagacctgtgatgtaatatggattcaccagtgtcggctgcacacctgttttctctgcgatcagttctgctgctttctctcccagtgaatagaatacaccgagtccgatcactgcaaccttgcttcctttctgtattacttcataagtattcaatttgctgaaatccttcgtcactgctttcccatccgaaatcatctcaccgcccggcacttttattgcaactggataagaattctgctccacactccaatcaagcatggcaagatattcttcttttgtcgtcggtgccagataaacaaggttcggaatatttgccatcatcggaatatcctgaaatcccagatgtgtgacatcattcattccataaacagaaccccagaatgtcacaattgttgccggactgttgttgatacacagatcctgtgcgatctggtcaaatgtccgctgtacaaaagtactgtacacgccgtaaacaggctttcctccatttgccgcaataccggatgccagagcaaccgctatctcttctgcaattcccacatcaataaactggcgtccggcttcttttcgcttatcttctgtaaatcccataactgcaggcgttccggatgtaatggcaaccacacgggaatcttctttcatctttttcaaaagataatctctcgtaataccggcgtagtcctccgtatttgaagtataaagaggttttcccgtctcaagatcaaacgggccgctgaaatgccactgttctttattttgctctgccggctcatatccttttcctttcagcgtattgatatgaaccacaaccggctgactactgttttttactttctgaaatgcctccaccaacgcttttgtatcgtttccctggtttacataaatataatcaagccccatcgctttgaacaggttacacggagctgttccgtttgtttcccgcagcagcttcagattctgatacaatcctccatgattctctgcgatggacatatcattgtcattcactacaatgattagatttccacccaattctgcggcgtagtcaattccctccagtgcttctccgccgcttaaagaaccgtctccgatcactgcgatcacatttccgtcttcccccttcagatctcttgcttttgcaagtccacaggcaagactgacagaagtagatgtatgaccgatcgtaaagaaatcatgctcactctcatgtggatttgtataaccggatacatcatcgtaatgctcttcataaagatatgcatcttttcttcctgttaacattttgtgcggataactctgatgggaaacgtcatatacaattttatcttttggagattcaaatacataatgcatggcaatggtcgcttccaccattccgaaatttggtccgaaatgtccgccatgccggcttgcccgggtcaaaagtgcatggcgcatctcttctgccagtgccggaagctcctctatcgtcagtttttttacatcttcagggctgttgattgtttcaatatacattaatattcactcctctttttctcatcaattcttactgtttttctcctttttgaggattgatgatactatatcacctggagttaactccaagtcaagagcgagtttaaatatttttttattttcttttcaccagacacgaatggcacttttttcataaatgtaatcaaacatactggtaataaaaacgaagatgtttcacgtgaaacatcttcatctccattttattcctttattttttcaaacctgtactgttgcttaatatccgaatatttttcatgatccacttcactcataaacattccatatggtcttgcacagattttaaacggagaatacaacccctgataaatcaccagtttttctcctgtctctgtatgctgcgcaaatgcaagcactttatataaatattctgaagtttcccctgacacccattctctcttaaaatgctgtacaatatctcccactcggatgtctctcggaatcacctcttcttgctttaactcaggctctgtatccaattctacatattcctctttatccagagaaacaggcgcacctgattttcccataatatggacgcctccataccaggtgcctgtaatctcaaacagatcccccacctgatattctgaagtatattcatcgttcttttttacaattcttattctgctcattctgattatcccttattctactttcttctttcaatcacatcactgattgcatcaatccctaaaagtatctgacttaccagaatcagcacaaataaaaatttcaccacttttttccctgtctcgtcttctctttctgcacagtcttttgcaattcttccgacaatccccagtaatccgatcagagaaattctctgcgctgttctgtttaacgatttgttctgataataaatttcctgcaataattcatgattgttcatactcatgttctcctctccttataatccgtctctgtaaatctgattgattgttgcctgagcatgttccagctcctttttctgcatgacggcatctcgatcactgaaaattgccagcatctcatccaccacatcttccgctctcggatttgatgttctgtaaagataccccagcatacgagttgccgtataatctgtcctgatttgattatacgcaatttctctgcaaaagtcatcaggataatccttctccttcaaagctctgtacaattcatcatttcttgctttttccatatttattgctgcccgttctttctaaaatactgttttttcaaattctttttctgataatggcttattcaaaaagtatccttgaatgacatcacaatacatctcttttaatacgccaagctgcttttgggtttcaacacctttgtttcatccctttttgcatcacttcccaacaaagcttaccttctggatgctcaacctgaaatatctttttacaacactcattcatatatacaatcttttttgcctcaacatctatgatacgattattcgaatttattccatttaaaattttataaaaaattgtgaatcggaattatctttcaccgcaatactccttttaacagcaaataattctctcccatattctacatcatattgactggaaaaatctactcaaaaaaatcctgtttcaaatggattttttgctccacttcaaacaggattttgattccatcatttaaatgtttcttactttttggataattgtacgataatcttcatttttttcaaataaaatctgtttgcccagtacaaagccttctaccccttttttccagagacgctccagaatctcccaggtcacaccgccgtcgatcacaatatggaatttataccgctgacgcaatttcaaaagttgctcaattttaggttctacaaaatgaagatagtctcttctcgcaaatccgggatttacggtcatgaccagcacgtaatctactaacgacaacaattcctgaatactgtcaagtgaaattccgggattgatcacaatcctcggagcctttccaagttcacggattctgcagagtgtctctgttggaattgcttcagaatccggatggatataaataatatctgctccgaactctgcttatcgttctatataacgtccgggattatacatcatcatatgaacatccagcttcaaagaagtgtttttacgtattgtttcaatatcctgaaaactcatcccgaaattaggcacataatggccatccattacatctatatgtaaaatatccgctccactcacatcaagtctcataatctcatctttcagataatccatcgaaagattcaaaagcgacgggcataataatttttccataacgcctctctccctactgaataagtcctgcagcagttggtaatgtcatagaaatcgcaggaatatatgtggtcagcaacagtacgatcaaaatcacaccaaaatagggcagtaattctttaaacacctgctcaatttttacatttccgaccttcgctcctgtaaacaagatagagccaaccggaggcgtaattgttccaatacaaaggttcagcgtgaccataataccaaactgtaccggatgcatcccgaacgtctgacaaattggcaggaaaatcggtgtaaaaatcaaaaccgccggagtcggatccataaaggttcctacgatcaacaaaataatattcattaaaatcaaaatcacatatctgttttctgtaatagaaagcattccatttgcgatcagatccggcaaacctgtaaatgccataacccatgacataatagaggataatccaatcataaacgtaataatacccgtcatttttgcaggaattcgtcgttctgcaacatatccacatttctttgctttaacccctgcaaggaacatcacgagtaatccccacagaattcccggcacatatcctcccgtaaacaaggcagcaactgatacacttcctgcaattgtcgaataaacaatcatcagattggacggtggaatcagcattcccgtcggtgcagaagcaatatttacaccggcactgtaaaccggatcatatccttcctttttttccatcggtccgatcgtaccacccattgcagcagccgctgctgcaccggaacctgaaattgcaccaaataacatgtttgctactacattagactgcgccagtgcccccggcatacgtccggcaacaaccttggcaacattcacaattcgctctgcaattccaccgttattcataatatttcctgcaagaataaaaaacggaattgcaatcagtgaaaatgaattggctccggcaaacaatctctgcgcagatgtcgcaaatgaaatatttgcatcgagcatacacaacatagccagcgcggatgataatcctaccgctacactgattgacacaccgatcgctagcataatcaccaaaagcacaaccataacaattgctgtttgatgtgtgactttatgaaatgagtattcaatgattcgggaaatgaagtgttcccagataaacaggtacaacaacattcctgttctcagtaactaaaattttgaaaagatagaagaaaataaaaaattgcttgagaaagtaagacaaaaatggtatattaataagtgtgttcccttagtaaaatggatattacggatccctcctaaggatcaagtgcaggttcgattcctgcagggaacgttttcaaaacgaggacagcaactttctttattcagccactgtcctcgttttatttttctatttctcttttcttcttacaaaaacaactacacctgtcaccgcaatacaaacaacgcaaaaaatcacatacgattttgaatatttaaaaattcacatatccctgcagccagatctcacctttaaatcgtcttccaatctctggctctcccagaacctctttcttcggaacacaaacatcgaactccagttcattgacatccagtttcatctgataaagccgttctccggtcaatgtattctccctctctctgatcgccagaatctctcccataattgaatacagatcacattccaccccataaggcataaagtaactgtccacaatggaatatacatcctctgtggccaatctacgagaaacttttgagtagatatccatatcttccagagtcaacgtttcaattgctccctgatctccattacgggcagcactcaaaagttgctttcgtgtttttgcttcctctcttgcgaaacacatctgtgtctcgctttttcttacaggcagcaggattctcccggacagagcaagaccggaaaaagtgacaccgtttggagctcctgtcatcgtacccagctgacgctctttcatatattctacgccattttgcattgtaaaaatcagactgatccccacttttgcatcttcacagattcctacgtactgttcgcgctcgattcgtttttcaatggaaacatctgcatatgttgtaacaccacttccctgaaaatacgggaaatagtattccatatcaaactggtcatgattatccagttctccacacaatgtaatccccacatcctgaccgtattccttttgaaattcacagtagtctgcttcttcattataggaaacggtcatctgatgggtaaaggtttctcttgtctgctccaatatttcttttagctctgcttttttcttgatgggaccaaacccaattgctttcaaatactgatgcatattactccttattttttcggttcgatcactgcatttccacccatatatggacgtaacgcttccggaatcttcacagatccatctgcctgcagattgttctccaggaacgcgatcagcattcttggtggtgcaacaactgtattattcagtgtatgtgcaaaatattttccgtctgcaccttttacacggataccaagtcttctggcctgtgcatctcccagatttgagcagcttcctacttcaaagtatttctgctgtcttggagaccatgcctccacatccacagacttcactttcagatccgcaagatctccggaacagcattccagtgtgcgaaccggaatgtccatagaacggaataaatccactgtgttcttccacaatttttcataccagtccatgctctcttccggtttacatacaacgatcatttcctgtttttcgaactggtgaatacgatatacaccacgttcctcaattccgtgtgcccctttttcttttctgaagcatggagaataacttgtcagtgtctgtggcagctgctcttccggaagaagtgtatcgataaatttaccgatcatagagtgctcacttgttccgatcagatagagatcttctccttcaatcttatacatcattgcatccatttctgcaaaactcataacacctgtcacaacattgctacggatcataaacggaggaatacagtaagtaaatcctctgttgatcatgaaatctcttgcataggaaataactgcagaatgcaatctcgcaatatctcccatcagataataaaatccgtttcctgccacttttcttgcactatccagatcgattccattgaatctttccataatttctgtgtgatatggaacttcaaaatcaggaataaccggctcaccaaagcgctccagttccacattttcactgtcatcttttccaatcggaacagatggatcaatgatatttggaattgtcatcatgatttttttaattttttcttctacttctttttcttctgcagaaagtgcttccatcttatctgcactctctgttacttttcttttcagctcttctgcctcttcttttttgccctgagccatcattgcaccaatctgttttgatgttttgtttttctcagctctaagtgcttctacttcacctttaatttcacgatttttctgatccagttccaatacctcatctaccagtggtaacttagaatcctgaaatttgtttttaatattctgttttacaacttccggatttgatcttacaaatttgatatctaacataattttcctcctcatacagtgtatatcactgcttcattgcttttttcaaagactctctttcttcttctccgagttccatatagctttcgccttttataatttcctttatataggtataacacccttctcggctgtgcatcgcattaaacacccagccattattattttcatctaacatcgtcagaacaaaactgagatttcctcccatttcctgaaatgcatcataacgtacaattcctattttctgataatgtgttttcattcttttgtaaattgtatcaatatctcttgtattctgttttactgcgcgttccagtttttctactgttttaaactgctccagaaatcctttttccagagatttaccatcttttccgcgcataaaaatctgatattttgcctgcatacgcttatgtttcatttgcagattgatcacaatcccaatgaaaaccacctgcatgatcaacaaaacaattaccagatacagtaatacttctgttgccattctcatgtctccttcttatatctgcgggacacctcttagctttgaatggacatgatcaagtcgaatattcgctccaattcttcctctgaataatattcgatttcaattttccccttaccattcgattttggatttacatttacctttgtccccatgattcccttcattttttcttccaggttttcatagataaatgtatgctcaattttttctttttttgcagtcttcttgggatttttcaatattttaatcagcttctcagtctccctcacactgagcttctcatcaaatattttatttgcaattgtgtactgttgttcttcgtcttccaatgcaagtaacgctctggcatgtccggttgagatcatatcatcaatcaccatctgctgaaccttactgttaagttttaaaagacgcattgagtttgtcactgccgttctgctcttcgatacacgttctgcaatctcatcctgttttagatgaaactctttcaataatcgcttgtatgcaattgcttcttcaattggattcagattttctctctgaatattttcaatcaaagaaatctccacaacttcctgctccgtatattcacgaaccagtaccggtacttcttttaatccggcaagctttgccgctctccatcttctttctcctgcaatgatttcataataatcatttttcttttgtactaaaagtggctgaagtacgccaaactgtttgatagaatccgccagctcaagaagggcatcttcatcaaaatcttttctcggctgttcactatttggttctacctgagtaatctttactatagtctcccctgatttttccatttttactttttctttttgagttttattagcctgtttttctgttgtcttcactgtcttgtttggaatcagactgtctaacccctttccaagtccatttcttttcactgccattttattcttctcctttattgatcacttcttcagccaataacaaataactttctgctcctgaagattttgggtcatataaatttattggcataccataacttggcgcctctgccagccggacatttcttggaataatcgttttgtagatgttttgatttaaattgtcttttacattttctacaacctggagtgagaggttcgttctggcatcatacattgtgaacacaacgccttctatttctaattttggatttaatctctcctgaacaagctctattgtgtggatcaactggcttaatccttccaatgcataatactcacactgaatcgggacaagtactgaatttgctgtggtcattgcattgatcgttagcatactcaatgccggtggacaatctatgataatataatcatatctgtccttcactttttcaacttcatttttaataatgtattctttattatcaacaccaatcaattcaatttctgctgccgacaaattaacattagacggaagtacatccaggttttcatagacttctttgcaaatacattcttcaatcccaatattcccaataattaaatcatatactgtattttcaacttcatctttatttacactcagtccacttgtcatatttccctgtggatccatatcaagtgccagaactttttgtccaagacttgcaagtgaagctgataaattgatagctgttgtagttttacctactccacctttttgatttgcaatcgctataattcttcccatattcgtactcctttcattgaacacgttcttattatatcaccttttacttttattatctatacaatgtttcacgtgaaacattgtgatttttatgaaatgttactgtttacactagatatttcgtattcaatactttctctctactttttaaaatgtttcacgtgaaacatttttgactataattcttataatcattttgtgattcagcatacatctaccgttccatttatttttgtgccaagtttgtccaaatagttgtttccggcacaatttcttcttcatttcccgcatagacctaattcagcttttcctctcctctattaaatttaaactatttctcattgtatcataaaaactacttttcagatagatttttcattaatccaaaatgtttcacgtgaaacattggctgtttactgtttgtctcacagaatttttcaaattttctttatttgacacctctcctgtagtataataagaaagtataaatggaattataaaggagggtatcattttgaactggaagaaaaatttgaaaacttgtacgatcctgacaggattaaccgttgcttctatgcatatcgttaatcgtttcgtttactatatgtctacaatagatgaaatgctgtctgacaaaaatgcagaatattatgactggcgttttggacgcatttgctaccacaaaacaggaagtggatctcctcttctcttgatccatgatctaaacgtctgcagttcttcctatgaatggaaccagattgtagatcaattatctaaaacaaatactgtatacacaattgatttattaggctgtggacgctcggacaaaccctatttgacctatacaaattatctttatgtccagttaatcactgattttattaaacatatcattggtgaaaaaactgatattatcgcaatgggggaatccggttcttttgtcttaatggcatgtgctaatgatcactcaattattgacaaagttcttttaattaatcctggtgatttgattgaactttcaaaaataccgacaaagcgtacaaaattaaaacagcattgtattaacatgcctgttgtaggaacatttctttacaatttacgctttaataaacgaaccatcgaaaaagatttatacttaaatggatactatgatttcaagaaaattgatacaaatacagtaaagaccttttttgaagctgcacatacagacaatactgccggaaaatatctgtattccagcatcaaatctcgctttacaaatgcaaatgtgatgtattctttaaatcgaattaacaacagcgtgtttattattgtagggaatgcaaatccagaatatgcactaattgcaaaccaatatcaaaattatatgccttctattgaaattcaagaaattgatcataccaaacgttttccacatctggaagaccctgaaacgtttttagaacaggttgaaattttatttgatatcaacaacggagaagagttatctacaaaataatgtggataactcttcttttttggtggataaactgtgaataacgtaaaaaaaagatgtaaacttttaaattgttgtacaattaaaatactttacatcctttttgtttacttcttgatttttaaagaataatttttttatttctctcttgttttatgacagtggttcttttgctggaagtcctgcttttctcgggtatttttttcgtgtctcagaaatcttttttattttcacaaaagaacgtccaatctcggtatccggcagctgaaactttactgttttctcaatttttccaccaagaagagacactgctttttccgattgtttcaattcgtcttcaacagttcctgatttataggatacgaacatcccgcctactcgtatatatgggatgcagtattcactcaaggttgacagatttgccactgcacgggacacacacaggtcaaattgttctctgtatgctgtctgctttgcaaaatcttctgctcttccatgaagcgtttccacatcttcgagccctaatttttctactacggcatctaaaaaattaattctttttttcagagaatccaacaatacgactttcagatgaggaaaggcaatctttaacggcagtcccggaaatcccgcgccggttccgatgtcaatcacagaatttacctgattcatatccactgtttttacaattgcaaggctgtccacaaaatgtttctcatttacttcatcatactcggtgatccctgtcaggttcatcaccttattccactccaccagaagctcataatactgatgaaactgctctttctggcgttctgtcagccggatatccagctggcttaattgctgttcaaatttattttccatacactctcctgttctctcatctgctctccagatacaccagcagaaccgaaatatctgccggagataccccggatatccgggatgcctgcccgatggatgccggtcggatctgcgacaatttctgctttgcctctaatcgcagactctgtacctcttcataattaatatctgcaggaatccgctttttctccagttttttaaactgctctacctgctttttctgccgtttgatataaccttcatacttaatgttaatattcacctgctctgcaacgtcgtatttaagctctggacgcattttatccactgaggcaaggatttcatagctaagctccggacgacggatcagatcagccagagacgcgcctgaaacaagcggtgtacttccgcaggactccagaagctcctgtacttctttggtcgttcccacatgcacactttccacacgctcgatctctttttgaatctgctcttcttttttcagcaggttctgatagcgctcctcctcgatcagcccgacttcatatccgatctttgtcagtctgagatctgcattatcctgtcttaaaagcagacggtattctgctctggaagtcatcattcgatacggctcatgactctcttttgtgaccagatcatcaatcagaactccgatatatccctcggaacggtcaatgatgatcccttccttgccctgcagctttctcgccgcattaatacccgctacaagcccctgcgctgctgcctcctcatacccggagcttccgttaaactgcccgccgctgaacagcccttcgacatttttaaactccagtgtactctttaactgtctcgcatcaatacaatcatattcgatggcatacgcatttcttacaattttcgcatgttcaagccccggcacgctgcggtacatcgcatactgaacatcttccggaagagagcttgacatccctcccacatacatttcgttggtgtccagtccttccggctcaataaacacctggtgccggttcttatctgcaaattttaccaccttgtcctcaatcgacggacaatatctcggtcctgttccctcgatcattcctgaaaacaacggagaacggtccagattttctctgataatttcatgggtcttttcattcgtataagtcagccagcaggaaacctgattgatctggatgtcctcagggtctgtcgtaaaggaaaacggtacgatccgctcgtctcctttctgctcttccattttgccaaaatcaatacttctcttgtcaatacgcgccggcgttcctgtcttaaaccgatacatttcgattccaagttctttcagactgtctgtcagataatttgccggctgcagtccgtttggcccggtctgcatgctgacgtctccgtaaatacatctcgcctttaaataggttccggtgcacaatacgaccgctctgcatcgatatgtggcaccagaataagttctgactcctgtaatgattttttttccgtcagccccatcctcagcaagaatctctgtcacttccatctgcttgatttccagattctcctgatcctcaagcacctttcgcatcgttttactgtaatttgccttgtccgcctgcgcacgcagagagtgcacagccggtccttttgaactgttcagcatcttagactggataaaagtccggtcgatcacctttcccatctcaccgcccaacgcgtccacttctttgacaaggtgtcctttggaactgcccccgatattcggattacacggcatcagcgcaatactgtccacacttactgtaaacatcagtgtctgaaatcccatcctcgcacacgcaagcgctgcttcacatccggcatgccctgctcctacgatcaccacatcatattcatctttattttcccatacagaatttgctgaatatttcattgaccaaatcttctcctatcgtttctcctgtaatacttccgagtgattcatatgcatccatcagatcgatggaataaaaatcctccggcatctcattttcaatactttcaatcactttatgcagactttctctcgcagactgaagtgctgctttctgtctgatatttgtaatgtatatttcatcattaaaggacagactgccctttaaaaacattttttccagtgtcttttctaactcctggattcccagttcttcctttgctgatatctcgatcatcggaatctctcgtcccggaagctgttctgccagcatctctttcgacacgacagtcttcagatcagttttatttaacaagataatcgcctttttatcaagtaccagattcaggattttctggtcgttttcatccaatgaccgtgacgcatccaccacatagataaccagatcagcactctttgcatactcttttgctttctctacacccatcttttcaatcacatcttccgtatcccggattcctgccgtatcaatgatattcaggctaagcccctgcagatggatctgttcttccaaaacgtctctggtcgtcccttcaatgtctgtcacaatggctctctctcttcctgaaagcacattcaacaaagaggattttcctgcattcggttttccgacgatcacggtctggattccctcttttaaaatcctgccgtcatctgatgaccggatgagatcctccagttctcttaaaatcccttctgtcactgtctgcagcgtctctccatatccatccacactgatgtgctccggatcatccagcgctgtttcaataaatgccgtgtgatacaagatctccttgcgcatctcttcaatttttcgctttacacttcctttgagctgactcatggagcttttcagcgcatactcattctgagatgtgattacatcgatcaccgcctctgcctgggaaagatccatctttccattcaaaaatgcgcgcttggtaaattctcccggttctgccggtctggccccgtttttgatcacagtttccagaacctttctcaccacaaatgttcctccatggcagttgatctccacggtatcttctcccgtaaaagttctcggtgctctcatcacactgaccagaacttcatctatcgtctcttccctatctttgataaatccatagtgtatcgtatggctctctgcctgagataactgttcttttcccttataaattctgtcaataattgcaaatgcttcctctccgctgatacgaacaattccaattcctgaattggtcatacctgtagaaatggcagcaatcgtatcctttttcatcttccacctcttggaaattctatttgtctgataaaaaaggacgttgttacgcttcacgaaagcctccgtgaagcgtaaaacgtcctctttcgcttcattttatactatctttttaatgtcacaactacttttctgtaaggctcttctccctcactgtgtgttgtcacatgcggatctgactgaagtgcagcatgaatgattcttctctcatatggattcattggctccagagaaactgctcttctcgttcttttcactttgaacgcaatgttctttgcaagatgtcttaacgtctcttctcttcttgctctgtagttttctgtatcaagtttaactctcacatatccgtcctgatgtttattggcaacacgatttgcaagatactgaagcgcatccagagtctgccctctttttccgatcagaattcccatattgctgcccttcatctcaacactgagagcaccttcagaatccacttcagaaacaatttccacagccatgtccattgcttttaaggtgtcattcagaaaagcttccacagctttgatcgcttcatcagaaacttctgccagctctgtagctttctttcttgccggctcctcttctgctttttcttcctgcttttcctgtacaggctctgatacctgctcttttacaacacttggttttacttcttcaaccggtattgtctcttctttcacttctgccacaggttccggttttctgcgggcttcgatcactgcctgcttcattccgattccaaggaaacctgcgctgcctttttcaatgacttcatattccagtctgtcactggtaactcccagctggatcaatgcctctgtgattgcatcatccactgtttttgctgatactctgatactaccgtccatcgtgaatccttcctttccccgactctctatttctcgctctcttccgttttatctttggcattgtgtccactgttataacggcttaccatatttgcctttgatgcgagacttcccggcttggcatttttgatattctcttttgcctgctggatcttttcttctttttctttgctggaaacacttgtcttctgttctgttacatttcgagtgctctttgttgccatccggttgatttcttttgccggagcaccttttttctcacgtttcttcgctgcttttttgcgctgctcttcgatcatctcttctactgatttcttgctcagatatttattgatcgccatctgctgtacacatcttacaatcgcactgatcgcccagtacagaccaagacctgccggcagtgtaaatcccataaatacagagaacaacggcataatatagttcatagaattcatggatcttgccatcggattgtccggatcgatcgtcgttgtctgttgctgctgcatcagttttacactaataaactgtgtcagacctgccatgatcggaatgatcactgccagaataattccaacaattgaaaaatccttcaaagcatccatcaacattgtcagcggctgctcaccaatgttaatgccaaggaatgtattcaaatgtcccatcgttgcagttgtcttatctacaactgtctcaagagacggcatcttgtccaccagagtattccatgtggagtcctggaatttatataacaccctcaccagaatattggggtctgtataatcatatgcatttgcaggcatatacaccggagctgcatttccaatcttttccagaatcttctgatatccgtctgtcgccatgatctgattaacaaccggcatataaatctctttaataccatttacatatctcggtacttcctgaataacaggatacaatgcgaacaaaatcggaagctggatcaccatcggcagacatccgcctgtcggagaacttccgtatttttcgtagatcagctgctgctcttcctgcatcttgagcatggatgcctgatctctttttcctgcatattttttctgcagtttttgaatttccggcatcatcacagactgcatttttgaaaatttctgctgtttgatcgtcagcgggatcatcaatgtataaataataattgtaaacagaataatacatattccgatattctgaattccaaataaattcagaaaattatagattgcatccatgagcttaccaaatacccatgcaatctgtccgacaatcggccagtctgccgctgtcgcagcgattaaaccaaattccatcttttatcctccttaaggtaccggatcatatccgccttttgcaaatggattgcaccgcagaatcctccagacggtcagggcaagtcccttaactgcaccgtatttttcaattgcctcaatcccgtattgggagcaggtcggcgtataaatacagtgatacgtcgtcttcaaaccggataaatacttctgataaaaccgtatcatccctatcaaaatcttcttcatctgcgtcacttcctttgaaatcatgcatatatattatgaagttttcccaggtggatgagcgcgctttctatatcatgataacttttctcttttgcgcctgctcttgcaatcactactaagtcaaatccacattggaaatgttcttcttgaagtcgatagctctctcgaataagccttgtaagatgatgtctcacaacgctgtttcctacttttttactgactgaaatccccaaacgatttttgtccatcccattttctctgacatacagtaccagatatcggttggcataggatttcccatttttatatacgacttgaaaatctttatttttctttaaagattcggaaaatttcatcgataacctctttttagcagctctttcccctggaaatactgcacttttttatagaagaaaaggccacatatatgcggcctaagctgataactgttttcttccttttgctcttctggcagctaaaacttttcttccgcctggtgtgctcattcttgctctgaatccgtgaacttttgctctggatcttttctttggctgaaatgtcattttcattggtacatacacctccttgtgattgatatacttattataaagtatttacaatatttgcctctttttttcgtatctctactatatatagtgtttatatagtactactgctgataaacagaaagacactgctcttaattatatgcaaaaaagcccataaagtcaagcattagcagcgaaaatactaaaatatagtttttcacatatttttttagaaatttttttattaccgctttttttcacacctgttccttttatttttttagttatccaaatcttttccacagaattatctacatttctgtttcttcgctcatttcttttcccatattctcaaacgccttatatttcctgagattttcacttttttgtttcatttacaaatttccctgattttcaccaaatttcgagtttccacattatctacatttttcttacccacagtaagaggatttatccacagttattcacattttgtggataactttatccaaatttgtggataaaccagcaaaacagtgtagaaaaccactggatattgtgtagatagcctgtagaaaaatttttatttctctttaagtttccctttttatcggcgttgatagtgtttaaaaagttttccacattatcaacaaagttttccacctatcaaattgtttcctgttatttttacattgcttctattttcattttgatgtagaatgtagttgagatactctgcttatctctcattttatattaattaggagtttaccattgatgaacattgtagaagaaaactgggagcagattttgaataagatgaaactagaatattgctcatccaatatttcgtacaatacgtggatcgcaccacttaccgtttacgaagtaaccgatgacaccgtatatattcttgtaaaattacgtgccagcctggagcacattgaagaaaaatacctgcttccttttaaagtatgtattgcagaagtcacaggatacgaatatgaagtctctttcgtgactgacgatcatgttgtcatccaggaaaaaaaagatacggcagtaaaaaaacagcagtcaaatgcgattttcgaacaggccaacctgaatccaaaatacacatttgatacttttgttgtaggaagcaataacaattttgctcatgctgcatcccttgctgttgcggattctccgggtgagatttacaatcccctcttcctctacggaggtgtaggacttggaaaaacccacctgatgcactccattgctcattttattctggaaaaggatccgacgaaaaaagtcctctatgtaaccagtgagacttttacgaatgaactaatcgatgctttgaaaataggtaaaaacggaaatgaacttgcgatgacgacattccgtgaaaaatacagaaataatgatgttctgctcattgacgatatccagtttatcatcggaaaagaaagtacacaggaagaatttttccatacattcaaccatcttcatgtttccggaaagcagatcatcatctccagtgataaacctccaaaagatatcgagactctggaggcacgtctgcgtacccggtttgaatggggactgatcgcggacatctcctctccggactatgagaccagaatggccattctccggaaaaaagaagaactggacggactggagcgataccacattccggatgaggtcatgcagtatattgccaataatattacatccaacatccgtgaactggaaggctctttgaacaaactcatcgcgcttgccaacctggagaacaagccgatcgatattcccctggctgcagaagccttaaaggatatgatttctccgaataatacacgggaaattacacctgagctcattatcgaggtcgtttctgaccactttaatgtacctgctgccgagttaaaaggtaaaaaacgaaacgctgagatcgttctgcctcgtcagattgttatgtatctctgccgtaaaatgaccgataccccgttaaagaccatcggtctgattcttggcggcaaagatcatgcctccgtcagccatggtgtcaagaagattgaacatgatgtaaagacggatgaggctttgaacaataccgttaacatcattaagaaaaaactgaaccccatttaatttggagtttatacagaactattatgaatctaaacgtttattttctgagggttttttgaccctcagattctttccgtttaagtgtggataattctgtggaaatgctgtggattatagtgttaataaaataatttctcaaggaggcagtaaaagttatacaaacaccgtccccttgttttccatactgtttctacagacttatgaaagtggacaaccccttgatttataaggctttgaagcatttatcaacatatccacaccccctacggcggctaaggcggaaaacttttatatttctctttataagattcggctgctgaaagttttccactacaaatcatatttcacaaattcgaaaggagattatcaacagatgagaatcgtatgtacgaaatccaatcttgtaaaaggagtcagtattgtttctaaagctgttccttctaaaacaacaatgcctatcttagaatgtattttagttgacgcatcgacagatgttattaagttgacagcaaatgatatggaacttggaattgaaaccagaattgaaggtgatattttagaaagaggtatcatcgcattaaatgctaagattttttcggaaattgtaagaaagcttccggacagtgatgttgtaatcgaaacgacatctgacaatcagactctgatcacctgtgaaaaagcaaaattcaatattgcagcacagtccggagaagatttttcatatcttcctgtaatagagaaagaagattacattactgtctcagaattcacattaaaagaagtgattcgtcagacaattttctccatcgcagataatgatacaaataagatgatgacgggtgaattgtttgaaattgaaggcaacatactgaaagttgtctcactagatggtcacagaatctcaattcgtaagatagaattaaaagaagattacggtcagaagaaggtcattgtccctggaaaaacgcttcaggaaatcagcaagatcattggtggagaggcggaagcactggttgatatttctttcacaaagaatcatatcgtatttgaatttgacaaaacagttgttgtatctcgtttgatcgaaggagaatattttaaaatcgatcagatgttatccagtgactatgaaacaaaagtcagaatccataaaaaagaacttctagactgtattgaccgtgccaccctgcttatcaaagagggagacaaaaaaccgatcattatcgatatcaaagacggaacgatggaattaaagatcaaatcccagatcggttctatggatgaaactatttttattaccaaagaaggaaaagacttgctcattggatttaacccgaaattcctgattgatgctcttcgtgtcattgacgatgaggaagtggatctgtattttatgaacgcgaaagctccgtgtttcatcaaagatgagaatcagagctatatttatctgatccttccggtaaattttaacgcagttgcgtagaaagtagagtgcatatggaaacaattaaattaagagaaacagatgagtttattaagcttggtcaggcattaaaggcagcaggactggtagaatcaggagtcgaagccaaggaagttattcaggatggaatggtcacggtaaacggagaggttgacacaagaagaggcagaaaattatatccgggagatactgcttcatttgacggacaggaaataaaaattgaaaaataacgaaaaaacgtgtaaaatagttacatattgatggagaaattatggttatcaaatctttaaagctcaaaaattacaggaattatgaattactggatatgacatttgattcaaagacaaatatcctgtatggagacaatgcccagggaaagaccaacatccttgaggcattgtatttgtcgggtacgacaaaatcccacagagggacaaaagacagagatttgatacagttcggcagagaggaatcacatctggagacgatcgtagagaaaaaggggatggaattccagattgatatgcatctcaaaaagaacagtccaaaaggaatcgcaatcaataaaattccaattcgaaaagcaagtgagttgtttggaattgtacattttgtctttttttctccggaggacctcaatattatcaaagacggacctgccggcagaagaagatttatcgatctggagttatctcagatcgacaaagtatatctgagcaatttatcaaattataatcgaatcatcaatcagagaaattctctgttaaaagagctttatcatcaggatcacttaatggatacgctggatatctgggatatgcagcttgctgagtatgggacaaaagtgatcgagagccgaaaacaatttatcaggcaggtcaatcagatcattgccgacatacattacaggctgacaggcgggagagagcggattgaactgtcttatgagagcagtcttggaagtctttctctggagcaggctttgaaaaaaaaccgggagagagacattcggatgaaaagcacttctgtcggtccgcacagggatgatttgtgctttttatcaggtgatctggatattcgcaaattcggctcacaggggcagcagaggacagcagcactgtcgttaaaactgtctgagatcgaactggtgaaagaagtgatcaaagatacaccgattttattattagacgatgtattgtctgaactggacaagcacaggcaaaactatttgttagacagtattcatgatatacagaccgtgattacatgtactgggctggatgagtttgtgaatcatcgattttctataaataaaattttccgtgtaagcagcggaagtgtgacaaaagaaaactaggaggtttttaaatgggtgcaacaggtactgaatttgatgcagaatatggagcagaccagatccaaatattagaggggctggaagcagtaagaaaaagaccgggaatgtatattggaagcacttctgcaagaggacttcatcatctggtatatgagattgtagacaatgcggtagatgaggcattggctggatattgtgatacgattaatgtgagtatcaatccggacaattctgtgacggtcgttgacaacggacgaggaatcccggttggattaaaccacaaggcagggattcctgcggtagaggttgtatttacgattcttcacgccggcggaaaattcggcggaggaggatacaaagtatccggaggtctgcacggagtaggtgcgtccgttgtaaacgcactctctgtatggcttgaagttgagatctacaacgaaggaaaaatttacaaacagcgatatgaacgcggaaagacgatgtattcgttaaaagtagtcggtgaatgtgatccggataaaaccggaacaaaagttacatttcttccggatggcgagatctttgaagagactgtatttgaatacgatgtattaaagcagagactgcgtgagatggcatttctcacaaaagggctgaagattattctgcaggatcttcgtgaagaagaaatcagagagcatacattccattacgagggtggaatcaaagagtttgtcacttatctgaacaaaagcaagacacctttgtatgaccagatcatttattgtgaaggcgaaaaagacggagtagttgtcgagatggccatgcagcataacgactcctacagtgacaatacgtatggatttgtaaacaatattacaactccggaagggggaactcatattgagggattcagaaaggcattgacgaagacctttaatgagtatgccagaaagaataaactgctcaaggacaatgagccgaatctgtcaggtgatgacattcgtgaaggtctgacagcgattgtcagtgttaagatcggagagccgcagtttgaggggcagaccaagcagaagctcggaaacagtgaagcgcgtggagcagtggacaatattgtcagcactcagcttgagattttcctcgagcagaatccatctgtcgcaaaacagacagtagagaaatctctgatggcacaaagagcaagagaggcagcaagaaaggccagagatctgaccagaagaaaatcagctctggaagggatgtccctgcctggaaaactggcggattgttcagacaaaaatccggaaaactgtgaaatctacatcgtcgagggagattctgcgggtggttctgcaaagacagcgagacagcgtgcgacacaggcgatccttccactgagaggaaaaatcctgaatgtagaaaaagcaaggctggataagatttacgccaatgcggagatcaaggctatgatcacggcgtttggaacaggaattcatgaggattttgatatttccaagctgcggtatcataagattattatcatgactgatgccgatgtggatggtgcgcatatcagcaccctgcttctgacatttttatatcgttttatgccggatctgatcagagaaggctatgtgtatctggcacagccgccgctgtataagctggaaaaaaataaaaaagtctggtatgcatacagtgatgaggaattaaatgagattcttacagaagtaggacgtgacagcaataataagattcagcgttataaaggtcttggtgaaatggatgcggatcagctctgggagacaacaatggatccggagcatcgtgtacttttgagggtgactatggatgacgagacatcttccgaactggatctgacatttactacactgatgggagacaaggtagaaccaagacgagagttcattgaagaaaatgccagatttgttaaaaatctggatatatagaattgcaatacacttaaaaaacaaggagaaggaacatggaagataatatttttgataaagtccatgaagttgacctgaaaaagacaatggagacttcctatatcgactatgcgatgagcgttatcgcatcccgtgccctgccggatgtcagagacggattaaagccggtacagagaagaatcctgtattcaatgatcgagctgaataatggacctgacaagccgcatcgtaaatgtgcgcgtattgtcggtgatacaatgggtaaatatcatcctcatggcgacagctctatttatggagcactggtaaatctggcacaggaatggtctacgagatatcctctggttgacggacacgggaactttgggtctgtagacggtgatggcgctgctgccatgcgatatacagaggcacgtctgagcaagatttccatggagatgactgctgacatcaataaaaataccgtagattttgcaccgaactttgacgagacagagaaagaaccgacagttcttccggccagattcccgaatcttctggtaaacggaacatccggtattgcagtcggaatggcaacgaacattccgccgcataacctgcgtgaaatcattggcgcggtcgtgaagatcattgacgaccagatcgatgaaaacggagagacaagtattgatgatattttaaagatcgtcaaaggaccggattttccaaccggagcagagattctcggaacaagaggaattgaagaagcataccgcacaggacgcggtaagatccgtgtgcgtgcgattaccaatattgaaccaatggcaaacggtaagaacaggattatcgtaacggagctgccatacatggtaaataaagcccgactgatcgagaagatcgcagagttggtacgtgataaaaaggtagatgggatcaccgatttaagcgatcagtccagccgtgagggaatgcgcatctgtatcgaattgagaagagatgtcaatccgaatgtaattttaaaccagctttataaacatacacagctgcaggataccttcggtgtgatcatgctggctttagtcaacaatgagccaaaagtcatgaatatcctggatatgctgaagcattacctgaagcaccaggaagaggttgtgacgagaagaacacagtatgagctgaacagagcagaagagcgtgctcatattttacagggattactgattgcactggataacattgatgaagtaatccggattatccgcggatctaagaatgttcagactgcgaaggaagagttgatggccagatttgacctgacagaagtacaggcaagtgcgatcgtagatatgcgtctgcgtgcactgacaggtctggagcgtgagaagctggaagcagagtacgaagaactgatgaagaagatcggggaattaaaagcgattcttgcggacagaaaactgcttcttggtgtgatcaaaaaggagattcttgtcatttccgaaaaatatggagatgagagaagaacatccatcggatttgatgagtttgatatttccatggaagatctgatcccaagagaaaatgtggtgatcaccatgacaaaaatgggatacattaagagaatgtccatggatacattcaagagtcagaaccgaggcggaaaaggaatcaaaggaatgcagatcctggatgatgactatatcaaggaactgtttattacgacaacacatcactatatcatgttctttacaaatacaggacgtgtgtaccgtctgaaaggctatgagattccggaagcaagcagaactgcgcgcggtactgcaatcatcaatctgctgcagctgatgccggatgagaagatcacagcaatgattccaatccgggagtacgaggatggacagtatctgttgatggcaacagaaaaaggtcttgtgaaaaagactccgattaaagattatgcaaatgtcagaaagaccggactggctgcgatcgttctcagagaagatgataaactgatcgaagtgaagattacagatgatgaacaggatgtgatcctggttacaaaatacggtatgtgtatccggtttagtgagaaggatgtgcgtccgacaggccgtgtttctatgggagtgcgtggcatgaaccttggagatcatgatgaagtgatcggaatgcagatcagcgatcaaggaaaatatctgctcattgcatctgaaaaaggtatgggcaaactgacagatatggatgaatttacaagacagaaccgtggaggaaaaggtgtaaaatgctataagatcacggaaaaaacaggcgatgtggttggtatgaaggcggtcgatgaagacagcgagatcatgatgatcaatacggaaggaatcgtgatccgtatgaagtgttccgacatttctgtatacggacgaatcacatccggtgtaaaactgatcaatctgcctgagaatgaaaaagttgcaagtatcgcaaaagtaagaaaagcatctgcagagatcgatggagaagaaatcgaaatttctgaggatgaggaagagacagacgttccaatagaagaataaagagaaagagccttcgcatgatatgcggaggtttttttaaaacaaataatcagataaaatataaaaaaataaagaatataaagaaaatatagataaaaacagtaaattatagtataataaagaaaaaagaaccatacaacaaaataaagtgcacacaaaggaaaccagaaaaccaatgattaaaatgaaatcagggagaggagcgtgagattatgaaaaaggcaaagagttggctggcactacctttagcagtttgtatgtttgcagttatgattttttcagttgcagaggcggcggaaacaagtgatgaaaatccggctgagggaagacaagagattacgatcatcaatacaaatcatataacctggccggtcatcggagaaatgccgtcatatgaattagaggttcctgccggtgcacactattttatcaatatggttgaatggacgacgaagaacggagaaaacacgttactgtcaacagataaatttgaggaaggtgagtatgagcttcatgtaacatatgaagcaaaagaaggatatcaattcgcagcgccggagctgattactgtgcttcctggaaatgaagtacagggaacaccaaaggtcgaagaatcagagaatggatggtatcggattgtaacattctcgttcacggcaagacagtcagaaaagcatcagcacgatatgttggtggttcaggaaaaactaccgacatgtacagaagccggatataaagcctgctatcagtgtcagtcctgcaaaaagctgtatctcgacaaggcgggaacagaggagacaacggtagaagagattacgcttcctccgacgggacatcagtataaagacggtatctgtaccatttgccaggcaaaagatccggattatgtagaaccgcacaaacatagtctgatccgggttccagaaaagcaggcaacatgtacagaagccggaaatagagcatactaccggtgtgatacttgtgaaaaattatatctggataaagatggaaagaacgaaacaacactggagaaggtgacgattgcagtaacaggacacatatatcgtgatggaagatgtgtagtatgtaaagccctggttccagcagtcaagactggtgattttgataacgactatgcaaaatgggtgattggactgctgatctcactcaacattattgtaggagcgatcatttatcgaaaatcaagaaaaataggataactggattgtatcacccccttcccgaaagagagccggaacctcaaaagagagcatccggctctctttttttgtttcaattttgaaggaactatactataatactggatagtgaaaacagaaacctgatgattgtaaaaaattctaggaggcattatgattcgtacaattgatgtgagagaaatctcaaaaaatatcaaagaaatgtgtattgaagcaaaccactatctgtcaaaagatatggacacagcaatgaaacaggcggagcaggacgaaaaatcaccgcttggaaaacagatattgggacagctgcaggaaaatttaaaaattgcggctgatgatatgattccaatctgtcaggataccggaatggcagttatatttctggaaatcggacaggatgtgcatctggaggggggccttctggaagaggcagtcaatgaaggggtcagacaggggtacacagaaggttttttaagaaaatctgtggtaaaagatccattaatccgtgaaaatacaaaagataatacaccggcagtgctccataccaaaatcgttgcgggagataaggtgaagataaaagtagcaccaaaaggatttggaagcgaaaatatgagccgtgtatttatgttgaagccagcagaaggtattgagggagtaaaacatgcgattctgacggcagtcagggacgccggtccgaatgcctgtcctccgatggtagttggagtaggaatcgggggaacctttgaaaaatgtgcgctgatggcaaaagaagctctgacaagagaagtgggggtacattctgacattccatatgtaaaagacatggaagaggagatgcttgtgaaaatcaatagccttggaatcggacccggcgggcttggaggaacaactactgcgcttgcagttaatatcaatacatatccgacacatattgcagggcttccggtaggaatcaatatctgctgtcatgtaaacagacatgtcgttcgtgaactttaaaagaaaaacagaaaggaaagcattatggaaagacatttgcaggctccgatttcaaaagaagaattaaaaactctgaaatcaggagattatgtatatattacaggaactatttatacagcgcgggatgctgcgcataaaagaatgtatgaaacactgcagaatcaggaaaatcttccgattgatatccagaatcagattatctattatatgggaccgtctccggcaagggaaggacgtcctatcggttctgcaggtccgacaacggccagccgcatggataaatatacaccacagcttctggatcttgggatgggtgcgatgatcggaaaaggaaaaagaacacaggatgtgattgatgctgtaatcagaaatggtgcggtctattttgcggcagtaggaggcgcaggagcgttgctgtcaaaatgtatcacaaaatcagaagttgttgcatatgatgatctggggacagaagcaattcgaaagcttcaggtagaaaactttccggtaatcgttgtcatagacagtgagggcaataatttatatgaaagtgcaatcaaagagtattgcacctataaaaatgagtaatttcaggagcagaaaaaatgaaacgtattttattaatggtgtttcggaatatcttactggttccgtacatgtggatcaaattgtgtcacagagcggcacacccggaaaactatacactggaagaacatgttaagtttttaaagtggattgtttttcgtgccaacaaaggtggaaatgtaaaaatagaagaacatggtgcagaaaatcttccaaaagagaacggatttatgttttttccgaaccatcagggaatgtatgatgtgctggctatattagacgcatgtccatatccgttttctgtagtagccaaaaaagaagtaaaggatgttccgtttttaaagcaggtcttttcctgtatgcatgcatatatgatagaccgggaagatatcaggcagtctatgcaggtgatcattgatgtatcaaaggaagttcaaaatggaaagaactatctgatttttgccgagggaacccgttctaaaaatggaaatcagatcggctccttcaaaggcggaagctttaaagctgcaaccaaagcaaaatgtccgattgttccggttgcattgattgattcttttaaaccattcgatacgaaaacaatcagtcaggttacggtacaggtacactttttagaaccgctgtattatgaagaatacaaaaatatgaaaactacggagattgcagagatcgtacatgaccgtatccagaaaataattgatgaaaattgtccggaaagggctgaaatacaatgacattaacacagttaaaatatgcgatcactgttgcacatgccagatctatgaatgaagcggcgagaagactgtttatttcccagccgagcttatcctcagcaatcaaagaactggagacagaaattgggattgatctgtttcgaagaaccaacagaggcgtgtctgttacgccggagggcgaggaatttatcgggtatgccaggcaggttgtggagcagtaccagctgatcgaatccaaatacgtggaaaaagaaaatcaaaaaaagaaattcagcgtatcaatgcagcactatacatttgcagtaaatgcctttgtagagatggtgagacagttcggcatggaagaatacgagtttgctgttcatgaaacaaaaacatatgacgtgattcaggacgttaagaatttcaaaagtgagatcgggattctgtatgtcaatgagtttaaccggaaagtactgacaaaattattctatgagtgtaatcttgaatttcatgaacttcttaagtgcagtatttatgtgtatatgtggaaaggacatccctgggcaaatcggaaagaaattgaactggaagagttaaatgaatacccttgtctgtcttttgaacaagggacgtacaattccttttattttgcagaagaagtgctgagtacatttgaatataagcagctgatcaaggtagatgatcgggcgacgattctgaattttatggtgggattgaatggatatactttatgttccggtatcatctgcgaggaacttaacggggaagagtattgtgcagtaaagctgaaatcagatgaagtgatgaccattggatacttggtcagaagcggagttgcaatcagtccactcgggaaaaaatatctggaagaaatatcaaaatataaagacaaaacgttggatatcaattaaaatatcacagccagtaatagggaaaaactattactggctgtatttttttagaattaacacatttccaactaaaatgatatagttaaatacatcccaaacagaataagggaaaacgaataaaaaatggaaggaaaaagcaatggcggaaattaaaattgaaaatgtgtccaaaacatattcttccaaagaaggaactgttcaggcgttaaaaaatgtaaacctgacaataagatcaggagaaatttacggaattatcggaatgtcaggagcaggaaaaagtacattggtacgatgtatgaactttctggagcagcctacatccggaaatgtattgataaaaggacgtgcattgggcgggctgaaagagaaagaattgagaaagcaaagagaacagattggaatgatctttcagcattttaatcttctgatgcagaaatcagtactggaaaatgtgtgttttccgatgtatatccagggcaaaaagaaaaaggaagcaagagaaaaagcggaagaacttctggaaatcgtaggattgaaggaaaaagcaaatgcatttccttctcaattatcaggtggtcaaaaacagagagttgcaattgcaagagcacttgcaacatcgcctaaaatcctgttgtgtgatgaagctacaagcgctttggatccacagacaacagcatcgattctggaattgttacgggaaatcaaccggaaatttaatattacgattgtgatcattacccaccagatgtctgtggtcagaaaaatttgttctcatgtagcgatcatgaaatcaggagaaattgtggagacaggaagtgtgtccgagatattcagtcatccaaaatcagatgtggcaagagaattaatccgaaaagatgaaggagatgatatcagcagagcagaatcttccggcaatacaaaagatctgattcagagtggcagaaaagtacgaattgtattttcagaaaattcggcgttccagccagtgatcgctaatatgatcttaaagttccgggaaccggtcaacattctgcgagcagacacaagaaatatcggaggtgttgcaaaaggcgaaatgattctggagtttgcaggagacagcagacaggcagaggaaatgcagaactatttaaaaacatgtggcattgaactggaggaggtgacggatgatgtggagtgaagacgtgatcttaatgattttaaatggagtaaaagaaactttatatatgacactggcatctacgattctgggatatgtccttggtctcccaatgggaatctgcctggcagtatcagataaagacggtttgaaaccgaatgcagtgttatataagatattagatcttatttcaaacattgtgagaagcatcccgtttctgattcttttgatccttgtgataccgctcacgagattgctcgtggggcaaagctacggatcatcggcgaccattgttccactggtggtggcagcagtgccgtttattgcaagaatggtggaatcttcggttaaagaagtggatgagggagtgattgaggctgcaaaagcaatgggagcaggaaatttcaaaattatcaccagggttcttctcgtagaagcgagaacatctctgatcacaggagcgacaattgcaatagggacgatcctcggatactcagctatggcaggaactgtaggtggcggtggacttggagatatcgccatccgttatggatattatcgatatcagtctgaaatcatgatcgtgacagttgttctgcttgtgatactggttcagattttccagtcggcgggaatgaaagctgcatctgtactggataaaagaaaatagaaaaacagcaaaaacaaaagggaaaaggagagagaatatgaaaaaggtaacagcaattatattaacaggaattttaacattaggagtactgacaggatgccaaagcaattcaaaagcagaggagaaaggcagcagtgaagatgcaaagacgattaaagtagcagcatctgcaactccgcacgctgaaatattggaacaggcaaaatcgattctgaaaaaagaaggatatcagctggaagtgacagtgtttgatgactatgtgcagccaaatgaagttgtagagagcggagaatttgatgcaaactatttccagcatgtgccatacctggaaagtttcaatgaggaaaaaggaactcatctggtagatgcaggagatatccattatgagccatttggaatttatccaggaacaaaaaagaatctgaatgaaatttccgaaggtgataaaatcgcagtgccaaatgatacgacaaatgaagccagagcattgcttctcttacaggacaatggaatcatcacattaaaagacggggcaggactcaatgcaacagtaaatgatattgaagaaaatccatataatgtagaaattgtagaactggaagctgcacaggtagcaagagtgaccggagaaactgcatatgtagtactaaatggaaactatgcgctggaagcaggatattctgtagccaaagatgcgcttgcatatgaaaaatcagattctgaggctgcaaaaacatatgtaaacattattgcagtaaaagaggaaaatgaaaaagaggaaaagatacaggctcttgtaaaggcattgaaatcagatgagattaaagaatatatcgaaaaaacctatgacggagctgtgattccttttgaataagcacgacaattgcacatgaaaatggaacactaagggcggacataacaacaaatcaaagaaatcaaagaaaaaagaaaaataaaaaagtttgaatttagacattgacattgtgacaacagtctagtataatcacatatgcactgttggtgcacaactgaataaatgctgtaagatattacagaaattcaggcgaggagaaatactcaagaggctgaagaggcgcccctgctaagggtgtaggtcgggaaaccggcgcgagggttcaaatccctctttctccgtttggtgcctatgcactaaaatgtattatcaaaatgaattaaaaaaagattcaaaaaagtgttgacaaacgaagatacacgtgataatatattaaagctgattcgaaacaagcgaaagcttgaaaagaatcacaaaaaaataaaacaaaaaagttcttgacaaacagaaaacaacatgataaaatatcagagttgcttctggagaaaagaaacaacaaagaaccttgataattaaacaatagacaacaaccttgaaaatttcttaagagaagattttttaagaacagcatctaaaagatgcacccgtcacatttaatgtgacagacagtaaaagggatgaattagctagtagttaattctgaccggaacgaacacttttaacgagagtttgatcctggctcaggatgaacgctggcggcgtgcttaacacatgcaagtcgagcgaagcgcttttgcggatttcttcggattgaagcaactgtgactgagcggcggacgggtgagtaacgcgtgggtaacctacctcatacagggggataacagttggaaacggctgctaataccgcataagcgcacagtaccgcatggtaccgtgtgaaaaactccggtggtatgagatggacccgcgtctgattagctagttggtggggtaacggcctaccaaggcgacgatcagtagccgacctgagagggtgaccggccacattgggactgagacacggcccaaactcctacgggaggcagcagtggggaatattgcacaatgggggaaaccctgatgcagcgacgccgcgtgagcgatgaagtatttcggtatgtaaagctctatcagcagggaagaaaatgacggtacctgactaagaagccccggctaactacgtgccagcagccgcggtaatacgtagggggcaagcgttatccggatttactgggtgtaaagggagcgtagacggcatggcaagccagatgtgaaagcccggggctcaaccccgggactgcatttggaactgtcaggctagagtgtcggagaggaaagcggaattcctagtgtagcggtgaaatgcgtagatattaggaggaacaccagtggcgaaggcggctttctggacgatgactgacgttgaggctcgaaagcgtggggagcaaacaggattagataccctggtagtccacgccgtaaacgatgaatactaggtgtcgggtggcaaagccattcggtgccgcagcaaacgcaataagtattccacctggggagtacgttcgcaagaatgaaactcaaaggaattgacggggacccgcacaagcggtggagcatgtggtttaattcgaagcaacgcgaagaaccttacctggtcttgacatccctctgaccactctttaatcggagctttccttcgggacagaggagacaggtggtgcatggttgtcgtcagctcgtgtcgtgagatgttgggttaagtcccgcaacgagcgcaacccctatctttagtagccagcatttaaggtgggcactctagagagactgccagggataacctggaggaaggtggggatgacgtcaaatcatcatgccccttatgaccagggctacacacgtgctacaatggcgtaaacaaagggaagcgagcccgcgagggggagcaaatcccaaaaataacgtctcagttcggattgtagtctgcaactcgactacatgaagctggaatcgctagtaatcgcgaatcagaatgtcgcggtgaatacgttcccgggtcttgtacacaccgcccgtcacaccatgggagtcagtaacgcccgaagtcagtgacccaaccgtaaggagggagctgccgaaggtgggaccgataactggggtgaagtcgtaacaaggtagccgtatcggaaggtgcggctggatcacctcctttctaaggagaaagaagtagaggaagtaagagctattgtttaattatgagggttctcaagaactcagcctttttggtggcgatgcgctcaggggaaacacccgtacccatcccgaacacgatggttaagacctgagcggccgatggtactgcactggagacggtgtgggagagtaggtggccgccaaaactaaaaaagaatatgggcttatagctcagccggttagagcgcacgcctgataagcgtgaggtcggtggttcgagtccacttaagcccatatctataaattaaatatgggggattagctcagttgggagagcgcctgccttgcaagcaggaggtcacgagttcgaatctcgtattctccacttgattctatcaatgtagaatcagatgtaccttgaaaattgcatacaaagagaaatatcttatgaaaataagagagttgaataaaattcaacaagacatccgaggtaatgttaacaacattataaaaaacaaactattaccaacgcatgtaacgctatacatgtgtagataagagaccaacccgtgtttcttgtcagttggttatgctaataagagcgtatggtggatgccttggcactaagagccgatgaaagacgtgataagctgcgaaaagcttcggggaggagcaaatatccattgatccggagatctctgaatggggaaacctacttgagaaaacctcaagtatccacagcccaatccataagctgtggaagggaacccggtgaactgaaacatctaagtagccggaggaagagaaaacaacatgtgattccgtaagtagcggcgagcgaacgcggaagagcccaaaccggagtgcgtgcactccggggttcggactgcagaattgacgagtgagcctagtagaatggttttgggaaagccagccagagagggtgaaagccccgtacacgaaaggcaagcaagcatggcaggatccagagtaccacgagacacgtgaaaccttgtgggaacgcgcggggaccaccccgtaaggctaaatactccttagtgaccgatagcgcatagtactgtgaaggaaaggtgaaaaggaccccgggaggggagtgaaagagaacctgaaaccatatgtttacaagctgtggaacatctttatatgatgaaccgcgtactttttgtagaacggtccggcgagttacgctggctggcgaggttaagggctgaaggcctggagccgaagggaaaccaagtctgaacagggcgaaatagtcagtcggagtagacccgaaaccgggtgatctatccatgtccaggttgaagttgccgtaaaaggcaatggaggaccgaacccacatccgttgaaaagggtggggatgaggtgtggataggggagaaattccaatcgaacccggagatagctggttctcctcgaaatagctttagggctagcctcatgcaagtcttacggaggtagagcactgaattcctaagggggcgtcaaagcttaccaagggatatcaaactccgaatgccgtgtagatggtgcatgggagtcagactatccgagataagttgggtagtcaaaagggaaagagcccagacctacagctaaggtcccaaaatgtgtgttaagtggaaaaggatgtgggatttcgaagacaactaggatgttggcttagaagcagccatccattaaaagagtgcgtaatagctcactagtcgagaggtcctgcgccgaaaatgtccggggctgaaacacactaccgaagcttaggaattgatgaacgtcaattggtagaggagcattcttaacggggcgaagctgtaccggaaggagcagtggactgttaagaagagagaatgccggaatgagtagcgagaggaaggtgagaatccttccggccgaatatctaaggtttccagagtaaagctgatctgctctgggtaagtcggggcctaaggcgaggtcgaaagacgtagtcgatggataacaggtaaagattcctgtactatatcataacagaactgtggggacgcagacagagagcataagccgggaatggaaaaaccggtacaagcgaggtaggagtgcatcaggcaaatccggtgtacaatctgaagacgtgatgtggggcgtaaagctggaagtatgtgagctggctgccaagaaaagccgctattgtttatgatatacccgtaccgtaaaccgacacaggtggatgaggagagaatcctaaggccgacgggagaagcattgttaaggaactcggcaaaatgactccgtaacttcgggagaaggagtgccatgtaaaagtggccgcagagaattggcccaagcaactgtttagcaaaaacacaggtctatgcaaaaccgaaaggtgaggtatatgggctgacgcctgcccggtgctggaaggttaaggggagaggttagccgtaaggcgaagctttgaacttaagccccagtaaacggcggccgtaactataacggtcctaaggtagcgaaattccttgtcgggtaagttccgacccgcacgaaaggcgtaatgatttgggcactgtctcaacaatgcacccggtgaaattgaaataccagtgaagatgctggttacctgcgccaggacggaaagaccccatggagctttactctagcttgatactgggattcgatattgcatgtacaggataggtgggagactgagaactgatgacgccagttgtcagggagtcactgttgggataccacccttgtagtattggatttctaaccagcagccgtgaaccggctgggggacaatgtcaggtggggagtttgactggggcggtcgcctccgaaagggtatcggaggcgctcaaaggttccctcagaatggttggaaaccattcgaagagtgcaaaggcagaagggagcttgactgcgacaccgacgggtggagcaggtacgaaagtaggacttagtgatccggtggtataaagtgggattgccatcgctcaacggataaaagctaccctggggataacaggcttatcactcccaagagttcacatcgacggagtggtttggcacctcgatgtcggctcatcgcatcctggggctgaagtaggtcccaagggttgggctgttcgcccattaaagcggtacgcgagctgggttcagaacgtcgtgagacagttcggtccctatccggcgtgggcgtaggatatttgagaggagctgcccttagtacgagaggaccggggtggactggccgctggtggatctgttgtattaccaaatgcatagcagagtagccaagccgggacgggataaacgctgaaggcatctaagcgtgaagcccccctcaagatgagatatcccataacgtcaagttagtaagaccccttgaagacgacgaggtagatagggcagaggtggaagtgcggtaacgcatggagctgactgttactaataggtcgagggcataaccaagcaaggtgataggaaatggatgaattctttgtatgcagttttgaaggtacaatatatcttcaatatggcccagtggctcagttggttagagcgccgccctgtcacggcggaggtcgagagttcgagtctcttctgggtcgtttaagatggggtcttagctcagctgggagagcatctgccttacaagcagagggtcacaggttcgagccctgtaggccccacttattaaataaggatggattcccgagtggccaaagggggcagactgtaaatctgttggcaacgccttcgaaggttcgaatccttctccatccatttgagtaccgtaaggactcagttaagttgccgatgtggctcaattggcagagcagctgatttgtaatcagcaggttatcggttcgagtccgatcatcggctttctcttatgagaagaatttaatatcgcggggtggagcagtctggaagctcgtcgggctcataacccgaaggtcgtaggttcaaatcctgcccccgcaatttagacttttaagtcttatgcccagatagctcagttggtagagcagaggactgaaaatcctcgtgtcgctggttcgattccggctctgggcattttcgttgccaggagtaatgaaataattgaataggggcgtgtagctcagttggtagagcacttgacttttaatcaagttgtccggggttcgaatccccgcacgctcattgtagaacaagcgattttgcttgttctttttgttatattaacttatattttgattacacctatgctatgcaaaagattcagcacagacataatatgtgaaaaagtctgaaatatgttggaatatttatttgaatcggaaatagatgtggataacatctaatttacaacacaggtatacagaagatataataaaagcgcaagtgatacggatagaaataaattggaaggataagcatttgcagaaaaatttatggaatacttatatgaaaaattagaagcatatgagaagtcgaattattatgggtttcatatgcctgggcataaacgtaattcggatgttacacaagcgaatttaccatatggaattgatattacagagattgaaggatttgataatcttcatcatgcggaggagatcatcagggaagcggaagtcagggcagcttccttgtatcatgcagaggagacgcactatttgattaatgggagtactgcgggcattttaagtgcggtaatgggatgtactaaaaaaggcggaaagattttaatggcaagaaactgtcataagtcggtctatcatgctgtttttttaaatgaattgcgtccggtatatatttatccggaatttgatgagacaatggaactgaatatggctgtgtctcctgagaaaattgagaggttattagaggaacataaggaggttcaggctgtggtattgacatcaccgacatatgacggggtgttgtcggatattgagaggatttctgaaattgtacatcagaaaaaaattccgttgattgtggatgaggcacacggagcacactttggatttcacccttattttccggagaatgcaaatacaaagggagcagatgttgtaatacacagtctgcataaaacacttccggcattgacgcagacagcactgattcacttgaatgggacacggatcgatcgaaggaagattcggaattatctgcatatttttcagacgagcagtccttcttatgtattgatggcaagtatggatgaatgtctgaggatggtggcagagcagggggatgtgttgtttgagacttatgtgaagaatctggaaagcaaaaggggagagttgaaaaaattaaagcatatcagattgatggagacagaagaattcgacagatccaaactggtgctgtctgtaaaagatacgattcttaagaaagagaatcgagtgtttacagggaaaatgttatatgagagattgcttttagaatatcatctgcagatggaaatggctgcaggatcttatgtgattgccatgacttcgattggagatacaaaagaaggaatggatcggctgatcagtgctttgtttgagattgatgaggaattggaaaaaaagtcagaggaagagaaaagatattatctgccccgtcaggaacaggtcttcacgagctttgaggtagaaggaatgcgaagaatggaaacagtaaagagcctgagctggcagaagtcagcgggatttatttctatggaatatgcgtatttgtatccgccgggaattccgctgatcgttccgggggaacgaatcactaaggaaacagcagcgatgttagtagattatcagaacaaagggttttctgtggaaggaattagtgtggaaaactatattgaggtgttgataaatgagtaaaattttttatattatggggaaaagttcttccggaaaagatacgatttataagaaaataagagaaaaactgccgcagttaaagcgtattactccttatacgacccgaccgatcagggaaggggagaccgatggtgtggaatatttttttgtggacgaagaaaggctgaacgagcttaaggagaaagaacgtgtcatagaagtacgttcttataatacaaagtgtggaatctggacatattttacagcagatgacgggcagatagatctccagaagtatgattatcttgtgatagggactctggaatcttattatgggatgcgggagtattttggagaagaacagctgattccgatttacattgaggtagaggacgggctgaggctggagagagcgctttgcagggaacgacagcagaaggaccccaaatatgcggagatgtgcagacgttttctggcagatgcagaggatttctccgaagagaatttgaaaagagcaggaattgtaaggagatttgaaaatctggagatggaaaaatgtctgagtgaaattacagagttgatccgggaagaaatgacttcgctttaaaagaaaacaggaaaaagataaaaagagaagcagacgggcagatttgccgtttgtttctctttttttgctttacaagagtttaacttgcaattgaagtgatgttaaaaaaggaacgttataatgacgaacgtgccattaagaaaggaaacagtttgatgttaaagaaagtaataaaagaggcattccctaccgtactggcgtttaccatgtcaggaatgtacagcattgtggatgggatttttgtaggaaaggcagcgggagatacagggcttgcagcgattaatattgcgtggccgatcccggcactgatcactgcgctcggaattggaatcggaacgggaggaagtgttttgtactctcattacagagggcggggagagcagaaggtatgtgaaaatttgtttgagcttacaatgacatttctgatcggtacaggtatacttgcaacgattttgctgtctctggtacagaaaccgtttttagaaattttgggagctgcgggaagtgttcagacggaagcaatcaagtatacggcgatcattattgccggaagtatccttcaggtggcaggaaccggaatcatgcctcttttgagaaatatgaatcagtcgctgggagcaatgctcagcatggcagcaggatttgcagtcaatattctggtgaactattatctgatgttccgattgaatatgggaatcaggggagccgcatttggaacggtgacggcgcaggccgtggtagttatggcaggatgtgcgatcctgtggaaaacaggttatcgaaaatggagactgttgtggcacaggcaatatgctgcagatattttcaagattgggattacggcatttggaacatcacttgcgccgacagctgcacttatttttacaaatctgcagtgtcttcgttatggcggaaatgcagcggtggcgtgttatgcggctatttcttatattgcattcccggttcagtattttctgacgggaatcggagaaggtgtacagcctctgattagtttttatcatggtgcgaaaaaggagacagaggtaagagcagtaaaaaaaatcgcttacaccgcagaaatcatcttaggaatcacggcggcagcagtgacgatctgtatgattccgtatattggaggatggtttggtctgtcagcagagtcaaagcagtatttttcttcggggatgctgatcagttcatttgcatttctgttaacgggaacggcaaaattgaatgtatcctgcctcaatgcagtcatgcagacgaaaaaagcggtgtttatgacttatatagaaagcctggcagtttcgccaatctgtctgtttttgcttccggctgtctgggatatcagaggaatctggctggcgctcccggtaacggcaggaattatgacagggatttacgggttgataagaaaggatagaaaaaatgaagaataaagtaaaattcaggcaactgggcagtgtgactctttttgttctgccggcattcattcctctgatcgtattttggatttatccgatcctgcgatctgtctatattagtttcacagactgggattatatgactccggactacaattttgtattttttgataattttatttcgttgtttcaggatgccagattttacgatgcactttggaacacagttgtgtttacattgggaactctgattccgacgatcgtacttggtctgatgctggctcttttgatgcagaaagcatttaaaggaagcgggatcatcaaatttattttgttttcgccatggatcacgccgactgttgcagtgtcgatcgtatggacctggatctacgatccgaatacgggaattgcaaatacggtaatgagatttctgcatctccccgaattacagtggattaaaagttcagacacagcaatgctcgctgtgatcattgtgactgtgtggaagagtctgggatatgcgatgatcttttatctttccgcattggaaaaggttccgaaagagttgtacgaggcaagcgggctggatggagcaaaaaggtggcagagattccgggatgttacgattccgtgtatttctccgactacgtttttcctggtaattattacgatggtaacttcactgcaggcatatgatcagatccagatcctgactcagggaggtccgtccggaagcacaagaaccttgctgtatatgtattatcagcttgggtttgaagagtttaacatgggacaggcaactgcggtggcgattgtgatgattataatcaccgtagtattatcggcagtacagttcggtgcatcgaaaaaatgggtgcattattagaaagaaggacagattatgaagataagaacaggaatcgaaaaactcggaaaaggaatgattttactgatcttcagtattttcacaatctttccgtttgtatggatgattttaagtgcactgaaaacaaaggcggagattatggatgtcagttcattttttccggcagaattccagtggcataacttttaccaggtcatttttgaatcaccgcttcttcgatatgtcggcaacagtttgtttgtatcagtgatcacgctggcgctgcagatcgtaacaggtgcgatgatcgcctatgcgattgtttttatgaattttaaaggcaagaaagcgttgtttgcagtcatcatgggaacttatatgcttccgacagcagcaacatatattccgagctatattattctggcaaactggaatctgctgaacacgtttacagggctgatcatttccaactgtgtcagcattttcggaatctttctgcttcgacaggcattcatgcaggttccaatgggactgatcgaggcagcgagaatcgacggggcaagctcctggaagattctgtggcgggtcgtgtgtccgatgacaaaatcttcgttcatcacatttggactgatgaactttattacctgctacaacagttatatgtggccttctctgatcacagatgcggatgagaagatgatggtgtcacagggattgagaaaattctttatagaaggcggtgcttatggaacagaatggcccctggtcatggcaggaagtacattgatcgtactgccgcttctgattctgtttgcatttacgcaaaagtggtttatcaatggaatcggcggagatacgggtatgaaaggataattccttttttacataaagaaagcaaagaaaaaacgatatacgatgcatgaaggagaaaaaagaaaatgaaaaagagaattgtatcagcattattagtttgtgtacttggaatgtccctggtgacaggatgtggaaacaatgcaaaggctgcagaaacgacaaagacagcagatggaaaaattcagttggatctctggtattccgggggaaaaacagcagtcaatgtatttcaggacattgtagatgcattcaatgagtctcaggacaaatatgaagttaagacaacaacgcaggcggattatacagagacttatgaaaaactgcaggcaggaatcgcaggaaagaaagctccggacatggcacttctggatacagataaatccagaaatctttctgaaaaaaatctggttgcagacatcaatgagtatgtagaaaaagatgattcctttgaaaaagatgattatctgccggtattttatgagcagggggagtatgagaacggaaaattgtttgcactgcctgcatatggtacaacacaggtgatgtactacaataaagcggcatttgaaaaagcgggaattgacccggcaacgatcaagacctggcaggatcttgcagcggcagcagagaaaatgacagcttctgatggttcctttgtgggctgggagccaatgtggggctcaggaaatctgattgatgcagcactcagcaacggagcctctcttctgagtgaggatgggaaaaaagtgatgatcaattcagacgaatgggtagaagtatgggagagcttccgtacatggattcacgatgacaagatcatgaaagtaaattccggcggacagggctgggaatactggtacacgacgattgacgacgttctgcagaataaagcaggcggttatacaggttcttccggagatcaggcagatttggactttagcattgtgggagcaatggaacagcctggatttaacgacaactcttcagcaccaacggcagatgcactgcagcttgtgatgcttcagaattcttctgatgaagaaaaagaaggtgtttatgagtttatgaaatattttacaactccggaaaatcaggcaaaatggtccatgggcacaggatatgtggcagtacgtgagtctacacaggaagtagaagagtttaagtcttatgcagaagaaaatcctcaggcactggttccgcttcagcaggcatctcacggaacaccggctcttcaggatccgacaggaggaaagattctggatgccctgtcaattgcagcggataaggtagagttggaaaacgtacctgcacaggaagctctggatgaagcacagaaaacagcacaggaagcattggatgcattataaaatgagagatcagattagatttaaaatcggaaaagaagaaaaaaatattcaggaaaaatggattgaaattccggaaggaacagaacacattcagatgatgatagaaatgcccgaagaatttcagtatatggcattcttgtttctggaagatcccaaaaaagaaattcggtttcagaagctgctgggatatgggcagcagaacccgggaatcggaaaaagcacaaaggatacaacgataggaggtgttccgggagagatttatcccggaacatggaaaatcggaatcggcatttttacagaatatgttgcgcagaagctgggagaacaaaccggagaaattgtactgacagtttcggaccggaaagatgaggtttctgatccgatcggcggagaatgctgggtggaaaacggacttcatatctcggaaaaaagctatcgttgggagaacgtattttgtccggaatccggatggtataagggtgattttcatacgcatacgaggttgtctgacggaaaagagacgatcggtcatgcttctgaaagagcagaggaaagcggtttggatttttatgtgccgacagaacataatctgatgcataccggctggtgtaagacttcactctgtgtgcttcccggaattgaggtaacgacagataaaggacacatgaatctgtttggaattacggaaatgccggagaaaattctggagatcgtgaagcataacggagatgagatcatagatatgtatatggaccagacgatagcacaagcaaaacaaaaaggatggattcgcagtatcaatcatccgtttctgaccatctggaagtggcagtttgaaaatacagatctgcgggatatcaactgtatagaaatcatcaatgatccgacatatccggatgggccgggatctaatgatatggcaattcgttttttggatcaagtatggaatgaaggaattcgtgtgttcggagtgggaggaagtgattctcacaatctggaggatgaattttatgacggggcaagccttccgtctgcggtgggagatcccgcaacatgggtattttgtgacggattaagtccgaaaaatctgatgaatgcagtaaggcagggacatctgtgtgtgaccagattctgcaaaatagagccaaaaatcaaggtggatggtcaggactgtcttccgggagatgagatcactgcaaagaagtgtgagattacatatcgggcggaaattttgggactgacagaagaaccggaagcatttcttgtgatgaatggaaattatgtggagctgccggtcagttcgtctgaaaccggaagatatcatgtagagacaaacttgattctggaacgtacctcctggcagtggatcagactggaagtcagaacaaagaaaaaagaatttcttggatatgtaaacccggtatttcgaggaaagaaagatccggagaggacaactttcggagaaatcaaaggagagacagaaggtttagcagatgattaaaggaattttatttgataaagatggaactctgattgactttttttccttatggctgggtgcggcaaaagcggtcgtaatacagtttttaaaagaaaatgagctttcagaggaagtaaaggaacgtgtgttttatgcgatgggaatcgagaatggagaaatcgatccttatggcgggcttgcgtataagtcctattcagaaattgctctggatattacggatgaactttcaagggagcagatttatctggacagccgaaaagtgaggatgcagctggagcggctgtttgctgaatatgtgacggaaagtcaggcacagtatgtggaaacagcggacattaaagcagtccttgattcgctgaaacagagaaacatttggatcggacttgcaacagcagatactgtgccgtctgcaaaaaactgtctgaaacggctggaggtactggaaaaatttgattatgtgggagcggatgatggtgtcctgcgcccgaaaccggaagcagatatgtttctggaatttcagaaaaaattcggactgaagccgcaggaaatcgcagtggttggagatacatataatgacattcgttttgcaagagaaaacgggggagttgccattggtgttttaagcggagtgagtcaggaagcagatttttgcggggaagcagattatatattaaattctgtgggagaacttccgcaattattggaacagatatagatattaaggaggcattgctgtggctgagattcagttgaaacatgtatataaaaaatatgaagacaaagtagttgcggtacaggattttaatcttaagatcaaggatcaggagtttgtgattttcgtaggtccttccggatgtggaaaatcgacaacgctgcggatgatcgcaggattggaggaaatatccgacggggagcttctgatcgatggaaaaatgatgaatcaggtacagtcatgcgacagagatattgcaatggtgtttcagaattatgcactgtacccgcatatgaccgtatttgagaatatggcatatagcctccggctgaaaaaggtaccgaaaaaagaacgcagacagaaggtggaggaagcggcaaagattcttggactcgaaggggttctggacagaaagccgggagaactttcgggcgggcagaagcagagagtggcaatgggacgtgcaattgtacggaatccaagaattttcctgatggatgagccattgtccaatctggatgcaaaattaagaacacagatgagggcggagatactgaggttgtaccagaagctgaaaacgacgtttatttatgtgacgcatgatcagacagaggcgatgacacttggaacaaagattgtagtgatgaaagacggagtgattcagcaagtcgcatcaccggaagaactttacaactgtccggcaaatacatttgtggcaggttttatcggaatgccgcctatgaatttctttcaggggaaatgctgcagaggcggagaatatggaacctatcttcagattggagattttgcggtcaatctgacagaagaagatgccgaaagagttttccgaaagggatatatgggtgaggtgatcacagtaggtgtgcgtccggaagatctggtacttacagaggaaggaacagagcatgaggttctggtgtatgaaatgctcggtgcagaaacctatctttattttacatacgaagggaaggatgtggcattgaggacaaatgcagacacaccatatagacggggagacaggatttctttttgtctcagaaatgataaactgcacttgtttgacggtgacaccgggatcagaatataagaaagacggcggaaggagacttctgctgttttttttgtgcaattgcaggaatctgggtatatcttacatcaaaattatgctatactgaaacagtaaccagaaggaattcaagaaaagacagcaggtgatgatatgagcagttttaaagacgtggttggacacaaaaatataatacagtatattgaaaatgcggtaaaaacagataaggtttcccatgcatatattttgaatggggaaaaaggttccggaaaacgacttctggcaaatttgttcgctatgagcctgcagtgtcagaaccgggatgaagacggagacgcatgcggaaagtgccagtcctgcaaacaggcagcatcgaataatcagccggatattatcagggtgacacacgaaaaaccaaatacgatcagtattgatgacatcagagagcagatcaacaatgatattgtgatcaagccatacagcagcaaatataagatctatattgtaccagatgcagatatgatgagtgtacaggcgcagaatgcgctgttaaagacgatcgaagagccgccggcttatgcggtgatcctgcttttgacagagaatgctgagattcttcttcccacgattcgttccagatgtgtaatgctgaagctgagaaatatcaaagatcagctgatcaaaaaatatctgatggaacagatggagattccggattataaagcagatgtgtgcgtggcatttgcgcagggaaatatgggacgtgcgatcatgcttgcgacatcagagcatttcaatgagatcaaggaagaggcagttcatctgctgcgtgagatcaatgacatggatgtggatgcgttggaggcagccgtaaaacgagtggtttcttataagatgaatatcacggactatctggatgtgatctcggtatggtatcgggatgtgctgatctataaagccacaaagaatgtggatcaggttgtattttctgatcagctcagatttatcaaggaccgggcaagcaagagctcttacgagggaatcgagaatattctggacggaattgaaaaggcaaaggccagactaaaagcaaatgtcaattttgaactgacgatcgaattgcttttattgacaataaaggagaactgatagaatgacaaaagtgattggagtaaggtttcggacagccggaaaaatctactatttttcaccgggaaagtttgagatcaaacagggagaccacgtgattgtggagactgcgcgcggtgtagagtatggaaaggttgtgatcggaaccagaaaagtaaaagatcaagaggtgatacagccgctgaagtctgtcattcggatcgccacagagcaggatcagaagacagaagagaaaaatagagaaaaagaaaaggaagcatttcagatttgtctggaaaagatcagaaagcatggtctggagatgaaactgatcgatgcggaatatacatttgacaacaataaagtgctgttttatttcacagcagacgggcgtatcgatttccgtgagctggtaaaagatctggcagcagtatttcgcattcggatcgagctgcgtcagatcggtgtaagagatgagacgaagatccggggcggaatcggaatctgcggaagaccattatgctgtcacacgtatttgtccgagtttgctgcggtttccattaagatggcaaaagagcagaatctgtcgctgaatccgaccaagatctccggagtgtgcggaaggctgatgtgttgtctgacgaacgaggaagagacttatgaagaattaaacagccagcttccgtcagtaggagatacggttacgacttcagatggattgacaggaacggtccattccttaagtgttctgagaaaactggtgaaagtagttgtaaatctggaaaacgatgaaaaagaaatcagggaatatcaggcggaagaattaaaattccgtccgcgtaagcgaaaagcgaaggtctcaaaagaagagatgcgcaagctcgcggaactggaaaagggagaaggagcgtcaagattagatgacaaataatttaaaatccggagagcgtctggatgatctgcagcttaatgggcttcagatcatccaggatccggaacgattttgttttgggattgatgcggtgatgctttctgattttgccaaggtcaaaccgggggagaaggttctggatctgggaaccggaactgggatcttaccgattttattgtccgcaaagaccagaggagagcattttatcggacttgagattcaaaaagaaagtgctgatatggcgcgaagaagtatagagtggaatcatctgcaggaaaaaattgagattgtgcagggagatatcaaagaggcggcagcgttattcaagccgactttttttgatgtgatcgtgaccaatccaccgtatatgctgaaccagcatggtctgcagaatccgggagatgccaaagcgatcgcgcggcatgagattttatgtactctggatgatattttacgagagagcaaacaattacttgcggacgggaaaggacggttttatatgatacacaaaccgtttcgtctgggagagattctgacgaagatgagtgaatataagattgaaccgaagaggatccgatttgtgcatccttatattgataaggaacctacgatggtgctgatcgaaggtcttcgaggcggaaaaccgagggtaacgatcgaaccgcctataattatgtatacccggtgagggtgagagaaaggaaacagcatgacaggaacgttatatttgtgtgcaactccaatcggaaatctggaggatatgacttttcgtgtgatccgtacactcaaagaagtggatctgatcgcagcggaggatacaagaaacagtatcaagctgttaaatcattttgagatacagacaccaatgaccagttatcacgaatacaataaatacgaaaaaggaagaaagctggtagaaaagctgttggaaggacaggatatcgctttgatcacagatgccgggacgcccggaatttcggatcccggagaggaactcgtgaagatgtgctatgaatccggaatttcggtaacatctcttccgggggcagcagcctgtattacggcactgacaatttccgggctgtctaccagacgatttgcatttgaagcatttttgccatcggataaaaaagagcgggaacagattttaaaggagatggagacagagacgaggaccatgatcgtatatgaagcacctcatcgtcttgtaaagactctgaaattgtttctggagcggcttggaaaccggaagattaccgtatgccgggagttgacaaaacgtcatgagacagctcttgcagtgactttggaagaggcagtggctcattatgaggcaaatcctccaaaaggggaatgtgttctggtgatcgaggggaagagccgggaagaagcccgggaagaggagagaaaacagtgggaagaaatgaccattgaagatcacatggaagtatacacaaaacagggaatggataagaaatcagcaatgaaagctgtcgcaaaggacaggggagtgtctaagagggatatttatcaatatctggaaagtagaaaataaaaaaggaacacggagatcagtgaaagatttctgtgttccttttttgtacgatgagcttatgtgattcagatttttttgatatccacaacctctccgtctctcatggagattactttttgtcctgcaatctcagtttctccccgcttgttagttacatagaggactgtaatgccaagctctttgttgatgcgccggatatcacgcatcatttcttttctgcgatgttcgttctgtcgggcaaaatcttcatcgaccagaaggacttttggtttgcatacaacagcacgtccaagcgcaacgcgttgtttctgagcctcattgatcacccggatctttttctcaagaatgtccgtgatattgaaaaaatgcgctgccattttcacacggctgtcaataatctgccgcggaagattgcgaaggcgcagtccaagcgcaatattgtcatacacgtttaagtgagaatagagctgataattctgaaacgccatggcaagactgcggtcacggggcagaatatcgttgagcagatcttttccgagatagatttcaccggatgtaatatcctccataccaccgatcatgcgaagtatggtggattttccgcagccgcttggtccgaaaaaggtaacaaactctccgtcttctatatgcaaagaaagatttttgacagatacaaatccgttgggatatgtcttgttcagattttcaagagtaatactcgccatcagaacacctccttatgtctaacatcagtgtaccatattcaaacctgcaaaacaatctattgcagcatgaattgagccaggaccacgctggctgccagtccggcgaaggtggcaatcagcgctccagtcagtgtgtagcgggagtttttgatctttgcggtcatgaaatagacactcatagtataaaagatggtctctgtacaggacatggaaatggatgcgatcagtccgatcagagaatccgtaccaaactctttatagagatccagaagaagtccggtagcggctgaggaagagaacattttgacaaccgtaagaggaaccagttctccgggaaatccaatggcagcagtaaactgcccaatacaggaggaaatcatctccagaaacccggaagcgcggagaatacccactgcaaccataagtccgatgagtgtgggcatgatcttgagaacggttaaaaatccgtttcgggcacctttgatgaaatgttcatagacgttgatcttcatcagaagtccatagacgatgatggcaaggatcagaaacgggacaataaaattggtgaggtagagaaaaagattcatgaatgactccaaaataaaatcagatttttaaatctatatgcggtttcagagaataacatccctcaagaactcataagataaaacaaaatcgattttgggagtttgccatgtcagatcgtttgcgaaagagcacaaaaaagcaagtcatctcgatcattcttgttcttaccttgctgttgtctgtgatattgtccggatgtcacgggcagtcttcagaaatccagaataaaaagttcagaaaatttaccgaaaccttattttgtcaggaagtggcgtcaaatacggtcagtctgcattatacactcaaagatcccggtcagtatgggattcaggattccccggttacattcggatattttaatacggataaaggaacccgaaaaatttccacagaaaatacacaggcggcattgaaacgattttcctatcggaaattatcaagggaaaacaggcttacatatgatgtgttggattattatctggagttatctaaaaaagaaagtgactatctgctgtatgaagagcccatggggacagtcagcggtgtgcagacacagattccggtactgttgtcagaatatcagtttcaaagcaaagaagatgtggatgcttatctggagttgatgaaaacaacacccgattattttaattccctgatcgcatttgaacaggaaaaggcacaaaaagggctttttatggcaagctatacggcggacaccgtaattgaacagtgtcaggcattcattgatatgggagactccaactatctgatttccacgtttgttgatcggatccagaagcttacagatctgtccgaatcggagaaaagtgattatatccagaaaaatgcatatatgctgcagacctatgtgttgccggcctatcagcagctgattaaaaccgtggtggagttgaaagattccagtaagaacgaagaaggactctgttatctgccaaacggaaaagaatattatgagctgacagtgcaggcgtccacaggatctgcaagaacagttcctcaattacagaaactgacaaagaatcaaatgaaagatgatctggcggcaatgaaagctgtgatcggactgacagcagaacaggcaaaggaaacagcagtgatggaatctaccgatccaaaagaaatattaaacagcctgagtctggatattcagaagacgttcccaaaacttccccagacgagtgtagaagtaaaatatgtgccaaaagccatggaagcacatctaagtccggcattctatatgataccggcactggatgacacagaagaaaatgtcatctatgtcaaccaggcccagatgggtaataagctgacactgtatacaacactggctcatgaggggtatccggggcatctgtatcagacggtttattacgcatcgacaaagccggatccactgcgcagtattttcaattttggcggatatgtggaaggctgggcaacgtatgcggaaatgggttcctactatctggcagattcgcttaccagggagcaggcggttctacttcagaaaaacagttccattttgctggcattgtatgcgctggcagatatgggcattcattatgatgggtggaatcggatggatactgtaaaatttttcaaagaatatggagtcggaagtgcggagatagtgaatcagatttatgatctgatcattggatctccgggaaattatctgaagtattatatcggctatgtagaatttctggaattaaagaaaaaatgggtcgaaaaaaagggcgaggatttttcccagaaagaatttcataaggcagtactggatgtaggaccggcaccgtttgaactggtagaaaaatatatgtggcagggagaaaaataaaagatgttgaattatctgtgggcaggaatgattataatcggaatcatatatggtgcattcaccggaaaaatgcccgatatcacgaatgcagctctggattctgcaaaagatgcagtaaccttgtgtattacaatggtgggagtgatggcattctggatgggaatcatggaaattgcgtcccgggcgggaattattgagatggcatcgaaaaaaatgagaccgctgatccgatttttgtttcctgatattccgaaagagcatcaggcgaatcagtatattacaacaaactttattgcaaattttctggggctgggctgggcggcaacgcctgccggacttcagggaatgcaggcactggccgaattagaacaggaaagaaggatgaaaagagcgccgggaaaggcaagaaagcccggcgtggcatccaatgaaatgtgcacatttctgatcatgaatatctcttcgctgcagttgatcccgatcaatgtgatcgcctaccggagtcagtatggaagtgtgaatccggcggcaattgtaggtgcggggattgtggcgacaacagtgagtacgctggccgggatggtgtattgtaagattatggacaggaggagataagtccgatccgggcatactcgatcaattcttcttccacgcgtttcatcacttcttttgtctccggattggtataagggatcctggcaatgattttgggaatatagttttgctcttcgatgatatccagactttcccggaagttaatatcataaaaataagcaagataagaaatccagtaatccatcggtgttacccggtcagaggacaggatacattcatgacgtaaaatagaatctcttacttttggagaaatcgcagaggcgcctgtttcctctgcggaagtatccataaaagtttccagtctgtcttccagttttacacggcagttgtccagtttatcggcatcccggatgatctttgcatgaagtaaagtacgtgcatcggaaattccatccagcttaaaatcactgtgtttggcaatggaaatacggatgatttcgtcaaaatcagattcgggaacaaacctgcggatcaggttttctccattatcattattgaacagaatttttacaccgtaagcggcatgatccatcgtgtccggaagaaagctgtcgaagcgttttaactgctcaaaacgtccgatatcatgcagcagggcgatcatctttgcaagtgtggtatcttcctcagataaccgcatacgggctgaaatgtcagtactttcttttacaacgccgtaagtgtgtacgatctttaaacggattttgtcattgtggcagtcgtagtcttttaaataattgttgaattgtctttttgcggtgtaaaaatccataaaagtggcactccttattattgggcataattatttttccagttgtttcttaagttgttcaatgatagtttgttgttcctgaataatgctttgttgttcaccaatggtatttttctgttcatcgatcgtatcctgcatttgatcgatcatgtactgcacggtattcttatccaatatttgtaattcttttgaaaacaatcccataactttctccacattcctgcaaagctcataaatctcccggtacataggaataaacttcggatattgtttgattagctggacgattatttccggattatcctcgctgagaaatgtgagccacgcatctaaatcgtttttgataccttatcggacaaagtccgcccgccgcaggcatgtattacgggatgcccggatgggtatacctttattgtgacgggtttcccgatagatgtcaagtgggatgaaaacgaattcctgcagaagctccatatgaagtcctgtatctgacttttgacaaaaatggtggacataatcctgcttgtgccgtttcatctctccagaacttttttctataaaaacaatggtatacacgctttttatatcccgatagctgaatttctttttccgttcatttttggcacgtttgtattgccggagcaaaagatcagccaaatagcatgcactgcgttgtccgggaaaggaatatcctattttttgcacttcaatgtttgcaatgcttccatcttccagttgaacaacaatatccataataagcaaagcattttcttctgcaattcgggaagaatcgtttggaagtacgtgtaaaatacgaatatgccgttgtaatatcagtgacagtaattcttccagacgtgaaggtgcagtatccggatttaaaatttctttgaaaaaagaatcgtaaagtattttgacaccctgcattcctgtgcaaaattgcagaaattcttcttgttgggattcgtcccacgaatcaaacagaaattttaattcaggggtagtttgaatttttttacaaagctcctctcgggtttgaatcattggaaaatattgttttagtccattgctcataagcggttcctcctgatggtttgtgaattagattgaaaatttgatgatttcatctggatttgttttttgaaaataaagaagagaacatggaaataaaaagaaatatccgttctcctgaaatgttatggataaagtctaacatgaggaatatgaagtgtccaataaaaatttcataaatagatagagtcaaaagaaaagccattgatactgtatacatcaaatatttaggggggggggtacatcttcaaaaaagattatggtataataatactcttataagaaaccaaatcaggaaatgatattttatagcaaaggaggcagaggatgctgcatgtagctgttgtagaagatgaaacagagtatcgtggattgatacaggaaatggtgggcagatatgcaaaggaatatgatctccagattcagactacagcatttcagaacggcagagagctggttcagaattatcaaaaatttgatattcttctgatggatatcgaaatgcctcatctaaatggtatggaggcagctcagaagatacgggggctggataaggaggtagtgattgtttttatcacgaatatggcgcagtatgcgatcaagggctacgaagtagatgcgctggatttcattttaaaaccgctcaactattataccttttccatgcgttttacaagagctgtgggaagagtgaaaaaccgggaaggaaaaaggatctgtctgaatcttccggatggaccgaagtttctggacagcagagaaatctattatgtagagatccagaaccggatgcttcactatcacacgaaagcaggaatatttacgattcgcggagcattaaaggacgtgcaggaagagctggaagactggcattttgtaaaatgtaatcagtgttatctggtaaatttgaagtatgtttccgaaatcagaaaaaacattgcggttgtgggtggagatgagctggaaatcagcagaagaaacagacctgcatttctgagtgcagtggtagattttctgggaggctgatacaggaaagggaagagggaaacgatgagtgaaaatctaaagctgggaatggagagcctgtggtatgggattaatttatggatatcctgtctgatgtttctgcttccgctgagaagaaagacacattttaaagtcagactgattctgtcgggagcagtatgtgttttaattctgtccggagtatattatttgatagaaaatcttacagactggagctactgggggcaggttccccttttatttattacgtattttagtgcggttctgattttttacaattgtgtgaagggcaagggatttggcctctggtattgtggtgtatggggaacgatgacatttttgctggtactggaaaccagctatgtactttgcagtccactgctgggagatttgggaaactggcttttgaaaattttattttcggtggcagtaaatgtggccataggactgacactggctcgctggatgccggaaaaggggcaatatcagattggcccgagacagatggtttctgcatgggtgttttgtattatgtcagaaaatttgtttatttacgcaaaggtcgatccgggggctgctttattcaacattgtgttgcagttttattgtatcaccttattgtatctgcaaagtgcattgtttaaaaagagcagtatgagaaaagagctggaaaccattcagcttctctggcatcaacaaaaagggcagtatcagctgtccaaagagacgatagagctgatcaatcacaaatgtcatgatctgaagcatcaggtacaggcgatacgtgctgtcaaagatgaaaaagagagggaaacatatctcgaaaaaattgaaaaatccgtgcagatctacagtgctatcgtgagaacaggaaatgaaattctggataccattttgacagaaaaaagtctgatctgtgaaaatagcgggattcatatcaactgtgtggcagatggatctctgctggcttttatgaatccggtagatttgtatacattgtttggaaatgctctggataacgcaattgaagcggtgagaaagctggaaagcaaagaaaaaagagtgattgatatcatgctgtacgaaagacaaagctttctgatgctgcagatagtcaatccgatgtgcggagaagtgaagtttgaggatggacttccgcttacgacaaaggcgaagaacggatatcacggatatggaatgaagagcatgctccataccattcaaaaatatgagggacatttgacaacagaggtaaaaaatggatgtttttatttcaacgttatgcttcctcttgaaagagattccaacaaaaagtagaagagacacaaagggtctggtcagtgagccaggctcttttttgtaaaaaatttacccacttacaccacaagaaataccacctgaacaaaaacggttgtacttgcaaattattgcagatataatcatttcgaaataaattgagaagtgtaagaaataacaaaaacatggagtaattactatgcgaaccagtaaaatgagaagagaaattgaactgaagaaaggctgggtgttcacagggcgtgacggaaaagcggtcaaagtggatttaccgcatacctggaatgcagtggacggacaggatggaggaaatgactattatcgaggaacctgtcactacagcactacatttgcagccccggatcttgacagcaagacccagagagtatatctggagtttcagggagtaaattcctctgccgaggtggtgttaaacggtcagaaggtgatgagtcatgacggcggatattccacattccgtgcagatgtgacagagtttttaacaaaagaaaacaagttagaagtagcagtggataacagtgtcaacgacagggtatatcctcaaaaagcagatttcacattttatggtggaatttacagagatgttcttcttcgtattgtatcaaatgaacattttgagatggactactacggcggagacggtgtaatggtaacgccgacagtagaaggaaaagatggaaaggttcatgtagagagtttccataaggcagaaaatgccaaagtagcagtaactttaattgatgcacagggaaatcctgtagcaaaaggtgaaggaaaagatgtgacggttacgataccggatgtacatctttgggatggagtagaagatccatatttatatacagcagtagtagagttgatgaaagacggagaagtcaaagacgacgttcgcattccatttggtgtccgtacattcagcgtggatccgaaaaaaggatttttcctgaacggacgctcctatcctctgcatggagtatccagacaccaggatcggaagggaatcggaaatgcattaacaaaagaacaccacagagaagatatggaatttatccgtgagatcggggcgaatacagttcgtctcgcgcattatcagcatgatcagtatttctatgatctgtgtgatcagtacggaatgattgtctgggcggagattccatacatctcagaacatatgccaaacggacgggaaaataccattagccagatgaaagagctgattgtacagaattacaatcatccaagtatcgttacatggggaatatccaatgagatcacgatttccacaaaggataataaggatatgctggataatcaccgtgaactcaatgatctgtgtcacaaaatggattccacacgtcctacaacactggcctgctatgcagtatgtggtcctttcaacaaggtagcacatctgtctgacttagtaagctggaacttgtatttgggatggtatgttccggggttatttttaaatgactggtggatcagctttttccaccgtgtgtaccctaacaggtgtttgggatattctgaatatggttgtgaaggaatgccgaatttacattcctcacgtccaagaagaggagaccatacagaagaatatcagagtcgctaccatgaatttatgctgaaatgttttgagcgtcatccgtatatgtggagtacccacgtatggaacatgttcgattttgcggcagatgcgagagatcagggtggagagccggggatgaatcataagggacttatgacatttgaccggaaaataaaaaaagacagcttctacatttacaaagcgtactggagcaaagagcctttcgtacatctttgcggaagccgctacgtagacagaacggaagcagtcactacagtcaaggtttattcgaaccagacaaaagttgcattatatgcaaacggcaagctcctggaagaaaagacaggcaataaagtctttgaattccgcgttccgttaaacggagaagttcgtctggaagctgtgtccggtcaggcaaaagatacgagcacacttcgccgcgtcagcaagccaaacccggattacaagctcaaaaagagcaaaggaaagagccagaactgggtataagtaggaagcaactgcaaatcttgcagaagaaattgaaataagaaacgagtaaatcggacggccctctgctttttacaaagcagaggtgctgttttaggtaaagaggcaaaccgccgtatccgggcgggagaatggagaataatatgaaacaggaatctactcaggcaacatctgttaatgctctgaacagggcaaagatgtatcagcttgttcttttccctatgaataatggggcgacaaacgtctattatattttgacaatgaactttattgcatattatgcaaacggaattcttggcttattgctggcatttgcaactacaatggtaacattgatgcgtgcaggagatgcgttcattgacccgatcatcggagcgatcatggacagaacttctaccagatggggaaaattcagaccgtttatggtaatcggaaacctgattatgatcgtatcctcaattttactgtattttggaacccgtatcatttctgaggatatgatgtggctgcgttatttatgctttattttattctacgcactgaatatggttggatatacatttcagacatcggttacacgttcaggacagacatgtctcacaaatgacccgaaacagagacctctgtttacaatctttaatacgattgccagcctgatcggaatggggcttgtacagtttcttgcgccgatcgtaaccggaggaaattacagaacagaagaattttttaatatcatgattcctctggcaatgatcgtatcagcgatcatgactgcactggctgttatcggtattgcagaaaaagaccgtccagaattctttggacttggtggagaaggcggaaaagaaaaagttaaaataaaagaatatgtagctattttaaaagcaaacaaagaactgcagagactgatgatcgcaggtgcaggatgtaagcttgcattctcgatcgcgacgaatatgacggttctggcaatgctttacggagcgatgatgggagattacaaaggtctgtatcttccgatgatgatcgtcggatatgtattttccgttccgttcttcctgttgacagtacgtacttcacagaagaaaggacagaaggcatctttaatgctctatatcagcgttgcacttgttatgtacatcggtgttttagtattgcttctgttgtggaaaccggaagttgcagcgatgaatgtgagtctgacaaacctgaatctttatacgatcctgtttatcctttttttcggaattggatacggagcatattatgcaacagcagatatgccgattccaatggttgcagactgttcagattacgaaacattccgctccggacgttatattccgggaattatcggaaccttattctcacttgtggataagctggtaagctctctgggatctacagtagtaggaattgcagtgacgatcatcggactgtcaacacttccggatggaacaaccccttattcagagggaatgcatacgatagtaattattttattctgtgttgttccaatgcttgcatggatcgcaacactggtcgcaatgcgcggatataaactgaccggtgcaagaatgaaagaaattcaggcgatcaatgcagtgcgtaaggatgcgatcagcaaaggaatgagcgtagaaaacgcaatgcagaaatggcagacgattgatcaggtgccggatgaatttaaagtacactaaaagtgaaaaagtaaacatatagaagggatatcctttcatcagatatgctccctttcgggaaggcagttaaaataacaagactgttctcccgggagggggcatattgtgttacagaactatttgtacctgaaaccgacttcgtgctataatattacagacacaaatcaacgagatacggagaaaattatgcagttacgatacgagatcccggacacattctggagtttgttccgttcggtaaaccgggagatttatatggagtcgctgctggtgatcaatgaggaatatcagtacagtaattattttctgacgaaagaaatctgtgtgcaggtattgagtgatatgaatgcacagaaacaggttttgcttcagcgggaggagaacgagacggattttgacatgctggagacgacagcatcccgcattttacggtggcttttaaagaccggatggctgaagaagatcgaagattacagtacgatgaccacaaatattgtgataccggattatgcggcggtttttattgaggcatttgagcgactcacgtccgaagagctggaagaaacagaattatatattcagaatgtatatgctacgctgttttcctttcagaataattccagagtaaatctgaatatgctcaggacggccctgatcaatacaagaaagctgaacaaagcgctgcaggatatgcttcataatatggacaagtttttcgagaggcttttggatcaggagtcttacggggaacttttgcgggagcatctggacgggtatgtggaagaaattgtcaagaaaaagtatcatattttaaaaacatcagacaatttttatatctacaagatggacattaaaaaatgtctccgggatatgcgggaaaatgaagaatggatcgaaagcatccggcagaaagcaaaagcagcaggagatacgaaagaggatgtgttagatctgttggatctgatcgaacggggatttgatgacattgaacacaggatctccaatatggacagagagcattccaaatatgtgcgggcaaccgtgagccggatgaattatctgttaagcggagagactgataccaaagggctggtggtgcagcttctgaataaaatatctgcgcaggaagaaccggagaagctgcttacggaagcaggaaaacggatgaacctgtctctgtttgagatgatttccgaaaaatcattgtataagagaagaaaacagaggacagactttatcagccagatgggacaggatgaagaatatgaagatctgaaccgggaggatgtgctgaagttaaaccggattcagatgcgctacagcagacaggagattgaggattttatcgaagagcatatggaaaacgaagtgatggacgccggaacacttcatattacagaagagacagcatttgaaaaactgatcctggcatatgactacagtaccagaaagaacagtaaatatcgggtattgaatgaggaggagacagtcatccaaagtggacagtatcaatatccggcattaaaatttgtgcgaaggagaccgcaatgatcgaatattacgaacagctttcggaagaagagcaggacgatatcaaacatgtgatccagacattatatcgtcagacctttcttctggaacgaaaatttgaaaaacggaccgggcggatggttccggtcagggagtaccgtgtatgcagcaagcacagggaatttctggagaaatattttgcagttgccggaatcacactgcaggaaaatctgcatatgggcgtcatgtacatccagggagagacactatggggagaaaagctctccagacttgccacaatctatattctggtgttaaagctaatctatgatgagcagatggcagcagtgtcatccagcagccatatcgtgaccactcttggagcagtgaacggaaaagcgggagaattccatgtgttaagcggcttgccgtccccgacagagatgcggaggactgttgcatttttgaaaaaatatcagattgtggaacctgtggatgtgatggaggagctggatgagaacagcagacttgttatttatccgtgcatcaatacagtgctgcttggagatgatatcagagaactattagagacgttcagcgaggaggaagacagtggagacaaaacaggcgttcaaagcgctctcgaaaatctgcctgaataactggcattacatagacagaaaagtacttactcttaatcagggaatcaatttctttaccggacattccggaagtggaaagtctacagtgatcgacgccatgcagatcgtactgtacgcgaacacagacggaagaggattttttaataaggcggcagcagacgactctgaccgttctctgatcgaatatttaaggggaatggtgaacatcggggaaaataacgaatcccagtatttgagaaaccagaatttctccagtacgatcgttctggagctggagcagacagatacgaaagaaaagcagtgtgtgggagtggtatttgatgttgagacagccacaaatgagatcaatcgcctgtttttctggcataaaagcgggcttctggaaaatcagtaccgggcggataagcgctgcctgacgacatttgaagtcaaagaatatctgcagcggacattttcaaaggaagggtattattgtggtccgagcaatgagagattccgcagacagatgtatgacatttatctgggtggtctggatatcgaaaaatttcctcgtttgttcaagcgagccattccgtttcgtatgaatatcaaactggaagatttcgtgaaagaatatatctgtatggagcaggatatgcacattgaagagctgcaggaaagtgtgatgcagtatggaagaatgcgcgggaaaatcgaagagaccatggaagaaatcgggtatcttcaggagatccggggttcctatcggcagtatgaagaaaaacaggaagagacggcgtcctgtacctatcagatttccaggctggaaatcctgcatctgcagagtaagatccaggaactgaatgaccggatgaaagagacacagacggagattgcaggacaggaagcgaaaagagtcaatctggagaaagagcaggcagaacttcagaaagaatacgaagcaataattttgaagattgcggacagtggttatgcagccatggaaaaagatctggagagtctgaacgaagccctggaacggctgcagaacagtaaggcaagatggaaaaagactgcagatggtctcaaagagtggaaagaaaaagatgtgacgccgaatcagaccttgtgggatattgaccggtttgtttctggaaagatcacggaaggtgagctggaacggctgcagacaagtctgacacagatccgggaagaactggaagaagagcgtcaggagacggatgccagacttcgcgcagtcaaaaaagaagaaaaagcggcacgggaagaattaaaagagctgaaacagggaagaaaagcctatccaaaagaactggaagaagcgagatatgagttgagaaaccggctgcatgagaagtgcggcaagtttgtcaatgtgcagattctggcagatcttctggatgtgcgggacgaacgctggcacaatgccatcgaaggatatctcggaaacaacaagctgcttctagtcgtggaaccaaagtacgcgaaaattgccatggaaatctatcaggacatggataagaagaaatttttccgggcagcagttctggatacagaaaaagtacaggagacagaatgggaagtaaaagaaggagcccttgctaaggagctgattgcaaaagagccgtatgtgcaggcatacatcaatttcttcctcggaaatgttatcaaatgtgaaagtatcgaagagcttcgtcagaaccggatcggaatcactgcagactgtgtgctgtaccacagcttccgtctgcagcatatcaatccggaaaattatacgagaagggcatatatcggagagaccagtatgcgtcagaggatccgccgtctggaagaaaaatgtgagagtcttcaggaggaacggattccactgcaggaaatgctggaagaaattcgcaggatctctcagctggaaggactgacacagcctctggaggattacagacaatggctgtctgatctgcagaaaattccggaaaaggaggcagaaaaggccagacttctggatacaatgcagaagctgcgagaggaatccgttctggtgtgggagcagcagaaacaggaaatccagcagaagcaggaagcaaagaaagcagagattgaggcagttcagaaaaccatctggaatcatcaggaaaacggaaaacgattccagaacatgcaggtagattttaatgaacagttagtgcagaaagaaaatgaattccggcagcaggacagagaaaaatatgagccggaatttcaggagtatctggagggcagacagagccgcaattatgagtacctgatgcgggaacgtatcaagaaaaaacagcctttggaagatgcgcaggaaaaagcatatgaaaaactggtagaagcaaggagtgcatatcttcgaaaatatccgaacagaacctattctgcaacgatccgtgacaatgacgtgtacgaaaagcagctttcaaatcttgagtgcgataacctggaaaaatacagggaagaagcacaggaacaggcgagagcagcagtggaacactttaaagttgattttgtatccaagattcgttatgcaatcaaagaggcatatcagaaaaaagatgaattgaaccggatcatcagccgtctggatttcggaaaggacaagtatcagtttgtcattacgaaaaacaaaggtccggacggacgattctatcggatgtttatggatgacgcattggatatcaatccgtctcagttgagtgaccacatggaaaatcagatgaacctgtttaccatggagcatgaggaagaatacggagatctgatgaatgagctgatcgagattttcattccgccggagaatgccaccagggaagagctggaggaagccagaaaaaatatggataaatatgcagattatcgcacgtatctttcctttgatatgcagcagatcgtgcagggagaaaaggatatgcggatcggtctgagcaagatgatcaagaaaaattccggtggagaaggtcagaacccactttacatcgcgcttctggcaagctttgcacagatttacagaatcaatctgtctccgaagatcaagcgtccgccaaccctgcgtctggttgtcctggatgaggcattttccaaaatggatgcagagaaagtagcaagttgtatttctctgatccggggactgggatttcaggcgattatcagtgcaacaaatgataagattcagaactatctggaaaatgtagacaagacatttgtgtatgcaaatccgaataaaaagcatatttcaatacaggaatttgaacgaatggagtttgaacagctgcaaggggaagaatgatgacgtggatataaaattgtggattcgtgcatattatcaggatttgctggaacgatcggaaaataaacgaaaaaaagatcttctggaattattagcggatgagaaaaaatatgccccgtgctttgaaggtctggatcagcttacagaatctgtttttaaaaggattttcagtaaaaaatatttgggaaatacaaaaacatttgaacaagagatgcaaagtcatgtcatcagtactgcgaaaaaattctgtccggatgtagaaaaagaaatggatgacacgacagtgcttcagcagctgtggatcgaagaatatgcacaagaactgtctttaaaagggaaactgcatttttgtctgaaagaagaaaatggaagcactcaggagattaatacagagtgttatcggttcggtactacattaaacagtcagacactggagcatgccgagataaaagaagtacagaatattcagaagatcgtgatatttgagaataaagccaattatatctctgcaccgtataaggatggtattctatacttatttagtcatggatatttttctccaaaagaatgtagctttttaaagcagctgcatcaagtgttaaaaaatcagacatcctgtgaagtgcaatattttcacagcggagatctggattacggtggaatcaaaatttttcagtatatacgcaaaacaatctttccggagttagagccgcttcagatggatgttgagacatatgaagcatatcaggaatttacagaagtgatagatccggaaacactggaaaaactaaagcgtgttcaggatgaaaatccaaagctgcaagagctgatcaaaaggctgatagaaacaggaaaaggaattgagcaagagtgttttttaatagagaaaagagggaatcacatatgaaattaatgatcgcatcagatattcacggttctgcatattactgcagaaaaatgctggaggcatatgatagggagaaggcagataaactgcttttgttaggggatattttatatcacggcccccgcaatgatcttccgaaagagtatgcgccgaaagaagtcattgccatgttgaatgaaagaaaacaggagctcttatgtgtcagaggaaattgtgacacagaagtggatcagatggttctggaatttccgattctggcggactattgttttttgaatctggatggacagaatatttatgccacacatggtcatgtgtggaatccgggaaagctgccgatgctgaaagcaggggatattctgctgaacggacacacacatataccggcatgtgaaaagattcatacggaagcagatcagagtgtcatgtacatgaatccgggttctgtgtcgattccaaaagaaaattcagaacacagctacatgatctgtgagaatggtgtgtttgaatggaaaaatttagagggagagggttatcaaatatggaagagagatacgcgttgctgatcgatgcggacaatgtttcagcaaaatatatcaaaccgatactggatgagttatccaagtatgggaatgtcacgtacaagaggatttacggggactggaccagcacctacaattccagctggaaagaggtgcttttgcagaactcaatcacaccgatccagcagttcagctatactcatgggaaaaatgcgaccgattcggcaatgattatcgatgccatggatatgctgtacacaagcgagctggaaggattctgtctggtgtccagtgacagcgattttacaaagctggcaagcagacttcgggaaagcggaaaaatggtgattggaatgggagaagataagacaccgccgccgtttcgaaaagcctgtgatatttttaccgtattggaattgctgttagaagacagcatgcttgaaaaaccggaaaaagcagcggcacatgcagttataggaaaagagtccaaaaaagagtctgccggtgcagtctccaagagtcagattgaagaagcggtcgtgaagattattacagaaaatcaaaacaacgataaggagacaggacttggagaggtcggaagccgtctggtcaaactgtacccggatttcgatgtgcgaagatatggatacagtctgttgtccaagtttctggaaacatttccaaaactgaagctgttacaggatggaacgaaagtatccgtgacattgtatgaagataaaagtcagcaggagcgtattgaagaatatattatgtaccagttgaaacaggcgggatgtcagggagtatctctgggaactctcggaaataagattcgaaataagttcgggaattttaaagtgagagattatggatattcgcagtttcagcagtatatcaaaagctttccggatgtagatttaaaggatgacggagagcagaagtgggcagtgttggtaggaaggggataaggtaagaaaaaaacaattgataaggggttacaaattgtgatatattagtgaaacggtgggaaaaacaatcaagatagattgttttttatcgtccaaaagaaaaagggaggaaaatagttatgaaacgagtagtatcaatcttgcttgcagcaaccttgatgctgacatcaggaacagtgacctacgctaccgaagaaaatcctgtacaaatggaatatcagactgagggtcaggatgcagttcaggcagtaaatggaacagaacaggctccattgaaagatataggagtggttcaggtatcaattgcgccgggaattacgctgcaaaaaagtgtaacgtttacggttggattaagtggtcaggaaagtcagagcattgaactggcagcaaatcaggaaattcaggatacaaaaggaacagttcattttagtcagttaccggcaggaacttatgagctgacagtggcagctcccggatttgctacatacacacagacaatcgaagtgaacagcaagtcgtatgctgtaaatttgatgacagggtttgtagagggatatacctatgaagagggggattatcatccgggtgtgttgctgattggtgatgtaacaggagacggagtgatcgatgacacagaccgttcagtattagtagatgcgattgatacagagcagtcatcagaattgacggatctgacaggagatcagaaaacagatctggcagatttggaatattttgcaaaaggatatcaggcagaagggcacacactggcctgcatagaagaatctgtttctgcagatgcgatcagcccgaaaccgggagaagacacaaatgtggaaggaaacctggaggatttactgaaaggagaaggaaatgttacactttcaacgcaaggtggaacagaaatttcagaagaacatcctgtttcagtagagttcgacctttcagaaagtgcagacacacaaattgacggaattctaattgagactaataaagaaaatccaattcaaaaagctactgtggatattacatatatagatgcagaaggaaacgagcagaccgtaactgcaccgatagaaaatggagtggagcacttactgagaactagtgatgtgcaggtttccatggatgaagatggaaatattcagattcatctcggaagtcagattgctgtaaaaaaagtaacgcttacgatccagggaatgcagaacaacaataatctggcggaaatttccaaagtggaatttgtaaacggaatggaaaaccggattccaaagccggatatggatattccgacaaatcttgcagttgagacaggtagtgaagaatttacacttacctgggatgcgtgtaaaaatgtgacaggatacgaggttctgattgagcataacggagagcaggatacgtatacagtcaagaataattcattgaaagtaacatcatttaatgaaaagaaactcgtgaacaaagaacaatacacagcaaaagtgcagtctgttaatggaacctggaaaagcggatacagtgaatcggttacagcagttccgaaagcggacaaaaaaccggatgcaccggaaaatgtaaaggcagtcggaaaatataagagtgtggaagtttcctggaaaaacatgaaaaacacagagttttataatctgttttaccgtgaaaaaggtcaggaagaatacaccaaaatagaaaatatcacgacaaacagctatacaatatcagagctaaaagagaatgtaaaatatgaaatctatctgacaggtgtgaatgagttgggtgaaagtgatccatccttaacgagcacagctcagacaacggatctggaaccagcagtcatgccgaaatacaagcagatcaatacatccgaagaaggacaagtaagttctcatatcgtatctgcaacaagaggacgtggggagatgaaagacagtcctctggacttagagggtaagacggcatggggaactgtggataacaatcctgcatctcatttttatatggcagactgggatgacggtggggaatataccgattttaataacaaaggatttacattcgagtttgatcagccgtatacaatggatacaattgggttccaggaagtgacggcacagggaaatttcacacggatcagtctgaaatactgggatgaaaatggaagcgagcatgttgtagataaaaacaatctgaaaatagaggcaagaactgacaaaaataacaaaagatattattttattcggattgcagagccgattcaggctaaaaaaattagttttggaatcggaagagattattccggcctgcgtgttatcacggtttcagagattagtttttacaattatgactctctggaagatgatattatgggactatatgaggatgagcttcatacagttctgaaaggatctgtgacagagcagacgatacaggacctcaggaatcgtctgcagacaaaggacgaggcaagtggagagtatcatccggataaagaccgtttggaaaaagaactggataatgcagaggacattctgaacaatcagttgagtgagccgattctggtacacaataccattacaacaagagatacagacagaggttttagtggtctgaatgcatggcagccacttggaattactgcagcagcaggagaagagatcacactctttgtcggacacaatacaatgggaaccggatccaacacaaaccttcagcttgtagcgacacaatatcacgcagaatcaggttctgtgtcaaaagtggtaacaacactgaaaacaggaagaaatgatgtaacgatcccgaaaatctggtcaacagatgaagagtcaggaggagcattatatattcaatatacaggcaataatgcaaatgaccgctattctgttcgtgtcaatggcggagtggaagttccgacgttggatctttatggagtgacggatgcacaggaacggcagcaaagagcagaacagtatgtagaagcgttgaagggctatgtagaaaaaatggaagctgttcacaaaaaagtacatgaaaattccggaaatgaatctgtggaatacgaatacagcaaagaaaactgtatccttggagcaacagatattttactggataagatgctgttttcattgccggcacagcaggttttaagcggctgtgagggaaatgcacagaaattgttagattccatggatgcaatggaaggtatgatgaatctgttctatcagcataagggattgaatcagacagcaccggatgaaaaagacagattcccgcagagacatttgaatatccgttatcagagaatgtttgcaggagcatttatgtatgcggcaggagatcacattggaatcggatggaatgaaacagctggtatgatgacaggagttccggttcagtctgataatggaaaatacgtaagcggacgctattttggctggggaatcgcccatgagatcggacataacatcaatcagagtgcgtatgcatatgcagaagtgacaaataactattttgcagtgttggcacaggcaaaagatacaaatgacagtgttcggtttgaatatccgaaagtttatgagaaggtgacatccggaacaaccggaaaatcagaggacgtatttacacagcttggaatgtactggcagttacatctggcatatgattccggatataactttaaaacctatgacaactatgaagagcagttaaataatctgttttttgcaagagtggatacttatgcgagaaacacggcaaaagcaccggcacctcagggtatcgcgctgacattgtccggagacagagatcaggatttcatgagacttgcgtgtgcggcagcccagaagaatattctcgaattttttgaacgctggggaatgatcccgaacgatgagacgagaagttacgcagggcagtttgaaacagaaacaagggcaatttattatgtaaatgatgattcaagagtgtatcgtctggaaaatagcggaagcagcctgggaagtctgggagatgtagaagcagtcggagatgatactacagtaagcgtcaataaagacacagcaaatcaggtcgattttacattgacttccaagacaattccggaagaagacgtattgggctatgaaattacgcggaccatgatttcgggaggacaggttgaaaaagaagttgtaggatttacaacagaaaaccagttcagtgatcatgtgacaactgtaaataacagagtcatcacctatgaagtgacagtggtggacaagtatttgaatcgttcggcagcgaagacattgacaccggtcaagatcgaacatgatggaagcctggataaggaattctggactaccacaacgaaaaatatggaggcagttcatacagaagatccgggagaagcagatgaagatacaccatgtgcaccacagcaggaagcgccgatcttaaaagcagtggacaataagacggatacaacatatacaggaattgcaggagatgaggcagaagttttgatgcagtttaatcggaagcagatcatttcaggattgaaatatacagtaaacgagggaacagcgatcaaagattacagcatttatgtgcatggggataatgatgaatggacagaggttgtaaaaggttcatttgatgacaaaaaagtacagacggtatattttgaaaatgtggatggcaaatatgtcggcacatacagtacagatgcagtaaaactggtcattcataaccagaaagacaccgaaatatcaatatcggaactggatgtactgggagttaccggagataatgtagatttcagaagtgctcaagatggaacttccgcaattgggcgtttggcatcggattaccaatacggagaaacagaagcagataagataccggcagggtcaatcgtttttgttggttcgtataaaggaaatccggcatacaatgtagtacttctttatgatcaggatggaaatattgtaggcggaacaaatacggatggaagtttgaaagcgcagcagatcattcttgcagatgtaccggaaaccgggaatattcaggatgtatcggatggtacatggatttactggatcgatccgcaggatagtgcccaattagccggaaaacaggtgcgtgcagagctttacagagtaaatgatgcacagacaaacgaagggcagagactggtaagtgattctctgtatgtggaagtgcctcaggaaatgccggaaattgaactcaatggaaatcagtaatcaaaaaggagtatagtgtgaaaaagtatatagcaagaatcgtggtcatgcttcttattgcatcggtacttccgttacaagtatctgcagcagaaaaggaaagtattgaactggcagttgaagcggagcaggtcggtgtgtcattgacattgccgcagtctgtcagtggaaacatattgtcacttcaagtaggcttgaaggtagattcgaatgtgcaggaagagacgacagcaacatttcagttttctgaaaatgtggcaaaagtagcagactatcgttacaatcaagaaaaagggatcctgaatatttatctgtcaggaacaaagactctttttcaaaatggtacagagtctttgaaacttggaaatgtgcagatcaatacaacaaatgagaatggtgcaacagttcatgtaagtgttgttgaaaattctgtaaaaatggtcaagggaacgaagacggaagtaattcaaaacatagattatccggaaaaagcagagattatcctgggcaatggtggtaatcaggataacggaggtgatccggacaatggtggcgaccaggataacggagatgctcaggataagacagagcttcagcaggtaatggaaatggcaaagagctacacgcagtctgagtatacaaaagaaagttatgcagtattgcagaaagccatggaaatggcgcagaaggttctagacaaagaagatgccacagaggaagagattacagaggccttaaagaatctggaaaatgcgatcggatcactggtaaagaaagaggacacatcttctccttctactgatcaggatgaaactacaaatcagggagcagataaaaataccagccagaatacggatcaaaagaatgacaagaatgttgtaaaaacaggagatgacagcatggtgattccgtttgtggcggcaattgcaatcagtgttgcagcggcagcatttattatttgcagaaggatgcgcagaaaatagaatatttgaattgtaaatagtatgggaagacaggagcgtcgagaaatgaaatcattttgcggcactcctgttttttataaaccatcttgacaaaactaaaaacctagtgtactatctaactatagcaccgatacatgaggtagaaggaggaagaagatgaattacaatgcagagatgccaatctatctgcaggtcattaacgacttgaagaaaaagatgatacagggaaagatacttcccggagagaagcttccatccaacagagagctggcggtcctttataagatcaatcagaacactgcagcaagaatctacagagagatggagacacatggatattgttatacaaagcgggggattggaacatttgtgatggaggaagagacgatgttcgagacgataaaaaaagaaatggcagaagaattgttgagcagctttatacatgagatgcaggatcttggatttgaaaaagatgatattatctcaaaaattgcagactacaaggaggagagaagatgattttagaatgtcgtgatttaagcaaatcattttacacaaaaaaggcgctgaatgaagtttcactgaaactggaaggcggaaagatctatggtctgctcggggagaacggaagcggaaagaccacatggatgaagatcatctccggtctgacaaagcctacatccggagagattttgttcaaggagcatccgtggttctatggagataaggcagagatcgcctacatgtctacagagccgtttttctacagttttctggatgtgaacggagtcggacagtactataaagatttcttcccggattttgatgagaagaaatttcacgagatggtaagaaggatgtccctggaaggcaagatgaaggtcaaagaactgtccaccggtatgacagcaaagctgaaggtgatcgcaacactgagccgcaaagcagagctgtatcttctggatgagccgttcaatggaattgattataaagcaaaagaagagattctcgggatgatcctggagtcagcaaatgaaaaaaatacctttgtaatttccacacatatgatcgatgagatcgaaagttttatcgatgaggcaatctttatcaaagatggagaagttgtgcgtcggatgtcagtggaagaagaacggatgcaaagtggaaaatccgtggcagatatttatctggagatcatgtaggaagaacaaaggcagaatgagaaaagagaaagagaggaaacaaaatgggacgcttgatcaaatatgagctgaaaaaacagcagacatccagaaacatcatactggcgctgcttctggtgtttttactggcagttgtagttggaacctttacagagaacgggaatacagttggaatcagtgtaatgctggaaatgtttgtcggaatgtttgtatttttctatatgggaattgaaagtctgttgatattgaaccgtgacctgaaaacaaagcagagtcatatgctctggatggtgccgatgcaaagctggaagatcctgggagcaaagtacattgcagcaattttacagattttctttatttcagcagcatacgtgctggcagcaatagcctgcattttgagtttgattgcaaaaatggatgcatgggaagagctttttaaagggcttcgcattggtgcagagtggcttttccagggcaatatggattggatcacacttatggcaatatttctgcttttcttccttgcatggacctgtgtgatcgcaaccggatttctggcagttattgtatccagaacggtgttgatcaattccagatttgcgggcattgtttcattcattttgttctttgtgatcaatgcaattgtggaatatatctacaatctgtttgccaaatacggacttatgggaatccatagcggactctatataggaattggagaatgcgcattttatattgttgcatgcattatactatttgtgatttccagtgttctggctgaaaagaaattaagtgtataaaatatggaaggtacagtctgttaaatcggattgtatcttcttttttaatttcacaactgtcttgtcacatgtaaagtcttgtgctataattgtcagcaattaacgataaaaatttaacaattcaagataagtgagggaatacaatatgacagttgtggaagaaatccagaaattaaaacaggaaaaaaatgcagttattctggcacattattatgtgagaccggagattcaggacattgcggactacatcggagattctttttatctgagtaaggttgcagttggattgaaagagcagaccatcgtattctgtggcgtgtctttcatgggagagagtgcgaaagtactgaacccggagaaaacagttctgatgccggatatgcatgcagactgtgcaatggcacatatggcagatgccaaaaccattcagaaaatgcgggatacatatgaagatctggcggttgtatgctacatcaattctacagcagagctgaaaacacattctgatgtgtgcgttacatcagcaaatgcggtgaagatcgtaaaagcgcttccgaacaagaacattttctttattccggacaagaacctggcacattttattgcagagcaggtaccggaaaagaattttgtatacaacgagggatactgtccgattcacgaacacatgcagattgaggagatcaaagaagcgaaagcacagcacccggcagcagaggtactggcgcatccggaatgtccaaaggcagtgcttgcaatttccgattatgtaggaagtacttccggaatcatcgactacgcaacgaaaagtgagaaacaagagtttatcatctgtaccgaaaacggcgtccgctacaaactggaaaaggacaacccgggcaagaagttttattttacagagacagagcctgtctgtacagatatgaagctgatcacactggaaaaggttcttcacgtcttaaaaacaggagaaaatgaagttcatttgagtgaggaattgagaactgactccagaaaaccattggaaaaaatgctggagctggcaaaatagagtgtctttcataaaaagagaggcctgccgaaaggaaagagagtattatgaataaaaaagcagatgttgttatcgttggaacaggtgttgcagggctgttttctgcattgaatcttccggatgacaaagaaatcatcatgatcacgaaatcagatgccgagagcagtgactcatttctggcacagggcggaatctgtgtactccgggatgaagaggattatgacagttattttgaagatacgatgagagccggtcattatgaaaaccggaaagaatctgtcgatattatgatccgcagttctggaaaaatcattgaagatctggtaggatatggagtagaatttgaaaaggacggagaagcgtttgcctacacaagagagggggcacactccagaccgagaattctgtttcatgcagatgtgacaggaaaagagatcaccagtaagctgttggcgcgggtaagggaaaagaataacgtaacaatttacgaatatacgaccatgacagacattcttgaggaaaacggaaaatgtgcgggaatcaccgtgaagacgaaaagtggtgaagagtcctctatttatgcagattataccattctggcaagcggaggaatcggcgggctgtaccagcattccacaaatttccctcatctgacaggagatgcactggaagtagcgaaaaaacatcacattcgtttggagcatctggattatgtacagatccatccgactacattgtattcggaaaagccgggcagacgattcctgatctccgaatccgtccgtggggaaggcgcacttctctataataaaaacatggagcgtttcgtagatgaactgcttccgcgagacgtggtgacaaaggcaatccgggaacagatggaaaaggatggaacgaattttgtgtggctgtccatggcgccgatcgagaaagagacgatattgagtcattttccgaatatttacgagcattgcctggaggaaggctatgatgttacaaaagagtgcattccggtcgttccggcgcagcactattttatgggcggtatctgggtagacaagaacagccacacgtccatgccgcagctgtttgcagtgggagagacaagctgcaacggtgtgcacggagcgaaccgtctggcaagcaactctcttctggagagtcttgtatttgcaaaaagagcggcaaatcttatcaaagagcaatggtgcctggaaaaagaacaggctgtataaaatgaaagaatagatgaaaaataaaggagaaaccagatgaatcagattacaatgaagcttcaggcagatcacctgatcttagaagcgttaaaagaagacatttccagtgaagatgtgacaaccaattcagtgatgaaagaggcagtggcaggtgaagtagacctgatctgcaaacaggatggaattattgccggactggaagtgttcgagagagtgtttacccttctggatccggacacgaaggcagagttatactgcaaagacggagaagaagtgaaaaacggacagctgatgggaaaagtcaaaggagacatccgtgttcttctttccggagaacgagttgcgctgaactatcttcagagaatgagcggaatcgcgacctataccaattctgttgcaaaacttctggaaggaagcaagatcaaactcctcgatacaagaaaaacaacaccgaatatgcgtatttttgagaaatatgcagttcgtgcaggcggcggatacaaccaccgttacaacctttctgacggtgtgctgttaaaagataaccacatcggagcagcgggaagcgtgacaaaagcggtgcagatggcaaaagagtatgcgccgtttgtcagaaaaattgaagtagaagtagaaaatctggacatggtaaaagaagcggtggaagccggcgcagatatcatcatgctggataatatgtcaccggaggatatgaaaaaagcagtggagttgatcgacggaagagcccagacagagtgctccggaaatgtgacaaaagaaaatatcgcgcgtctgacagagatcggagttgactatatttccagcggtgcgttgacacactccgctccgatcctggatatttctttaaagaatctgcatgcagtggaataaagatgcagaaaaagaaagagaggaacagtatttatgacaggttctgaacgcagagatcaaatcataaatcagattaaaaaaagcagtattccggtatctggggcgcagcttgcaaaagaatttgatgtcagccggcaggtgatcgtgcaggatatcgcactgatccgggcagcgggacatgagatcatatccacaaacaggggatatcttctgaatactccacattccgtgaaccggatcttcaaagtgaatcacacggatgaagagttggaagacgagctgtgtacggtagtggatctgggcggaaaagtggtgaacgtgatggtcaatcacagggtgtacggtcacatggaggcagagattaacatcacatccagacgaaaagtgatggaatttgtagaggatattaagcggggaaaatcaagtcctctgaaaaatattacctccaattatcactatcatctgatcgaggcagattccgaagagacactggatctgatcgaagaggcattacggcagaaaaaatttctggtcgaagtggccgctggatcgtaataagacaaatttttaaaaggtgcaatcttgacttatcattccggctgtgatacgattttcaacgagaaagtgtgtattttatacacatatctggtagaaaaatcatacggaaaatgcaaagacggagagagtaggttatccgaaattttacagagaattcccggaagatccgagaaaggatccgatgctgagagggatgaacggaagatgatcgaacatggctcccgagcggcgcagcaagcatgatgtgaactgcgatgggttcgccctttacagcgagagagtgtttttggcagcactcacagaggtttcagccgtgaggctgagataaatcagaagtggtaacacggtattcacccgtcttcttggcagcaggaagacgggattttttatgaaggagagaagagagatggcagacaagaaaccatattatatcacaacagcgattgcctacacatcaggcaaaccacatattggaaacacttatgagattattctggctgacgcgatcgcaagatacaagagaagtcagggatatgatgtatttttccagacaggaaccgatgagcatggtcagaagatcgagctcaaagcagaagaggcgggagtaacaccaaaagaattcgtagacaatgtttccggagaaatcaagaaaatctgggatctgatggatacttcttatgacaaatttatccgtacaacagacgaagatcatgaaaaacaggtacagaagatctttaaaaaactgtacgatcagggagatatttacaaagggcactatgaaggaatgtactgtactccatgtgaatctttcttcacagaatcacagcttgtagacggcaaatgtccggactgcggacgtgaagtacagcctgcgaaagaagaagcatacttctttaaaatgagcaaatatgcagacagactgatcgagcatatcaacacacatccggaattcattcagccggtatcccgtaaaaacgagatgatgaacaacttcctgcttccgggactgcaggatctgtgtgtttccagaacatcattcaaatggggaatcccggtagacttcgatccgaaacatgtaacttacgtatggctggatgcgcttacaaactatatcacaggaatcggatacgactgcgatggaaacagcacggagcagtttcacaaattatggccggcagatctgcatctgatcggaaaagatatcattcgcttccatacaatttactggccaatctttttgatggcactggatcttccgcttccaaaacaggtattcggacatccatggctgcttcagggagacggaaaaatgagtaaatccaaaggaaacgtcctttacgcagatgaactggtagatttcttcggcgttgatgcagttcgttactttgttcttcatgagatgccatttgaaaatgatggagttatcacatgggaactgatggtagagcgcatgaattctgatcttgccaacacactgggaaatctggtcaacagaaccgtttccatgacaaataaatatttcggcggaactgtaacagacaaaggtgtggcagaagaggttgatgcagatctgaaggcagtgacagaaagcacaccaaaagcagtcgaagacaagatggaagagctgcgtgtggcagatgcaatgacagaaattttcaatctcttcaaacgctgcaacaaatacattgacgagacaatgccatgggtactcgcaaaagatgaagcaaaaaaagaccgtctggaaacagttctctggaacctcattcagagcatttcccgcggtgcagaacttctggaatcctttatgccatccacaagcaaaaagattctggagcagctcggaaatggtcatgtaacagaaaaaccggaaatcctcttcgcaagactggatctggaagaagttctgaaaaaagtagaagagctgcatccaccggttgaagaagaaaaagaagaggaagatgtgatcgatattgaagcaaaaccagagatcacatttgatgattttggaaaaatgcagttccaggtcggagagatcattgcctgcgaagaagtgaaaaaatccagaaaactcctttgctcacaggtgaagatcggaagccaggtaaaacagatcgtatccggaatcaaaggtcattacacagccgaagaaatggttggaaagaaagtcatggttctcgtgaatctgaaacctgcaaaactggcaggcgtattatcagaaggaatgctgttatgcgcagaagatgcagaaggcaaccttgcactgatgacaccggaaaaatcaatgccggcaggagcagagatctgctaagagaataaagaaaatgtgagaaaatcccccggatgcaagacagaaaagttttgtatccgggggatgtgttttacaaaaattatttagcctcttcaatccactgttttacagcttcaacatcaatcccggtcagctgagcaatttgctccggggagtttccggactggaataaacgtaagacaatttcctgagccatttgcatacgaccaagatcaataccctctttatactggttttttaagtcttcttcataagccttttgattaaacgatgtcagaaccatactgattacctccgctttatgcttcaccagcacatcccgaagaatcccctttttcaatccactgtttgacagcttcaacatcaatctcggtcagctgagcaatctgctccggggagttgccggactggaataaacgtaagacaatttcctgagccatttgcatacgaccaaggctaaacccctcctcaataccctctttatactggttttttaagtcttcttcataagccttttgattaaacgatgtcagaaccatactgattacctccgctttatgcttcaccagcacatcctgaagaatcccctttttcaatccattgttttacaacttcaacatcaattccggtcagctgagcaatctgctccggagagttgccggaatgaagcatatggagaacaatttctttttgtccaagattaatgccctcctcaataccctctttatactggttttttaagtcttcttcataagccttttgattaaacgatgtcagaaccatactgattacctccgctttatgtttcaccagtacatcccgaagaattcccttttcaatacagatgtccaccgctttcgtgacagcgtgcctcggatcactcgttttcttacactgaatccttaccgtatccacaaaaatagaatactctttcagccgctggcatttttccataagcgcaaggttatgtccgtaattgatattcagcatcactgcggtgcactgcagacaaggctgccgattatcggatacagattcaaacgcatccgtcaatcgaagaatcgtctcatcaggttgttctttggtgccgttatagaacacaaagtattgaggaatcggcagcttcttcaaagtgctgctgtataaattgatgttttccgtctcgacgtatccatcatacaacctggcgagatagatcagtccgcgcaatggcatatttggattatacgtgctctgatgttcatagagattcagtgtcccgccgatcaggaatgaaatatcatttttcatagagagataaacagcgtcctccagtgtattcacttcaagatcattcggattttcatagcaggtattattcaatgcattgtataggtccaaaagatccctcttgttattgaaaaccaggcgaaaaagccgatccttatatttgtgattcgggacagggtgtttctggtgatttctttttttattttttctcatgtactttcctccattataaaaaacttatcctgtagatgcaatcttcttattcttgtgttcggttaaaatcaactgaaaatctggcgaaacgccggaaaacagacagcttctaaaagacagaagccaatgctgtacagacgacagctaaaaagtaaattcattatatctggttcggattataataacaatacgcagattacacaaaataaatattcagaaaattctgataaaaaacaataatttaaaaattattttaataaaatataaaaagtgtgttgacaaataaaagagatagtgttattattaagtcaatccaaaagagatacaacaatcacacatctcaaaaggatatttaactaaagagcgattcttaatttagtaagcagtcgttctgttagattaaaaataaacgaactaaggaggcagaggtccaatggacagtatatcatcagttacatttcaatatgtcagtggtacggtagatgcaggttcctgtaaaagagacctttaccacgaaagataagatccagtaaaagtgaatgaaaagatcaaatcgaagagattgtaaagctggatgaaaatgaaaagattcgacatctacagacgtattgaatatagataccacatgtagccaaagttcccgaacatgtgtaaagaaacatggataaggaatatcagttttatatgaagcacccccagttatagaaagaataatcaaataggatgttggaatatcgtcagatgatactgcagcagccgaaaggttatagagagaataactgaagagaggactttcatgataggatgataccgagtcggatttaggttatagatattgttaaattgaagaacaggaggtttcatataagccagtcttagtggacagactgctatatcaattaacataggtagaggtcttgcaggaacagaattaagaggttccttcgatttataaaatagaatatgaaaaatttgaataaaaagtaaaatgcatcttcaatgtcaattgagggtgcatttttttgacattacgggagtcatatggtaaactagaacaaactaggcaatgaagagaaagatacctgtaaggtacagactaagtataatgaggtgagcatagtggacaagtatgaatataagttgaagacagaacagatgctaaaacttatggaaaacggtgcatacaacagagccgctgagattgctgacagcattgattggaagcgtgtcagaaatgtaaatatgctgttaaacgtcagcaatatatatgaaaagatcagagattaccgtaagagttttggagttctgagagctgcctatcatagaacagaggggagcagaaagatattatatcgcttgtgcactcttgcgataaaggttggaaatctggaagaggcaatcgactattatgatgaatacgtacaggctgcgccaaaagatccgaatcagtacatcctaagataccgcctgttgagagcacgaagagctccgatcgagcagcagatccgtgcattggagcagttcaaaaaagcagagtatgtcgaagagtgggcatacgagctggccaagagatatgaagaagccgggatgacagccgaatgtctggaagagtgtgatgatctgattctgtggttcagcgaaggcaagtatgtatacaaggccatggaactgaagatgcgatacaagccattgactccactgcagcaggaaaagtatgacagaaggctggaagaagcagaaaaatcttcagaaagagaagcgaaaaaactgatcgatctgggcagaataaaagctgaggaagaagaaaagcggagaagagagcaggaagaagctgcccgctatacagaggatatgctggagcgttctgagcagatcgcagagccggagaatgccgaactcagtgaggaggaagtggcagagcagctgaaaaaagcggagccgccgaagaagaagctgggtgatacgatgaagcttggcgaggcgcttcagaatctgttccatacagaaaaagaagaagcgcaggagcaggaagagctggaacttttagaagaggatgcggaagagtacgaagaagacatcgaagaattggcagaagaggacgcagaaccggtggaaggtgatgacgaggagagtacaggggaagatgattgctcagatctggcagaagcactggaagagattgagtcattatcagatctggaattgctggatcaagtgacagaggaagaacctgtagaagagattattgaggagacgatcgagacgaaagttaaggaagttgacctgaaagaattagaagagctggcagaaccggaagtggcagatgcagcagatgtggaagtaatcgaggaacctgaagtagcagaagaggctgagaaggaagatatggaaaaagaatctattaaattagaagaaacagaaatcaaagaggatgagagaatagacgagccggttgacgatatacttgatattgatgatattcttgctgagtgggaagccgcagagggcagtgttgaaccggaagaagttccagaagtgaacgaagaggatatagaacagattgagcgcaagccaaagagcccgatcttatccccggatattcagaggatgatcgatgagattgaaggtgtgattccggaagaagagagtgaggagattccggtacacacgagtactcctgttgaacctcttgagaataaggaggaagcaacagaagagcttagaatggaatcagaagagctgactctggaggttgacagtgcagaagattatgaagaccttctgacagaagacgcagcagaggaactggaagaggaattcgaagaagaactggattacgatgatgattatgaggacgattacgaatcgattgcagcagggctgcaggaagagttcaagccgacgctgagtgatgaaccggacgatcgtgagattccggatgaagagcctgttgagtcggatattctgagttctacgacaccgctgagcagaaaagagactgcgaagctgattgcgacaggaaagactgcaccacttccgatggatgagattgcagatgcattatcgatttccgatacaggatttttggtacacagccgctatgatctgtccggacagggtgcaagaaaagcagggctgacagaggagcagaagaagctgttctcctactttgttccggtacgtggtatgagcgaacagctggtagatgttctggagcaggatcgcaattgtacgaatagaaaaggtacttcaaacacaggaaacctcctgatcgttggaaacaaggggaatggaaagacggttctcgcagttgatgtcgtaaaggcaatccagaagcagagaaagatccgtcagggaagagtcgcgatcatcacaggtgaggcattgaataaaaagaagatcagtgatatcgtagcaaaattatatggtggagcactgatcattgaaaaagccggaaaattaagtgaaagaacggttgcgaagctgaacaaggcgatggaaaaggatacaggtgagatgctgatcgtattggaagagcagagaaagccgctggatcgggttctttcttccaatagagaattcagaaagaaatttacaagcagattggaagtgccgatctttgtaaatgatgagctggttacatttggtcagacttacgcacaggagaatggatatcgtatcgatgagatgggaatcctggcgctgtacagccggatcgatgcgatgcagagagaagatcacgcagtgacagttgcggaagtaaaagacattatggatgaggcgatgtcgcattcacaaaaggtatccgccaagaagcttgtgaagcgagttcttggaaagaatacagatgatgcagacagaattattctgacagaaaaagattttaatatttagaattaggagatattgtgaagtagaagaatctacggagttactgttcagaggtatgcataagtcattgtaaaaaataacgaaatttatttttttattttgtggatattcattttgggcaggaaaaactgtgtttatagtttttcctgccgttcttttttggcaaagttatacaccagattctggattccagagcccgttttcgaagtttcatggctgatatcaatgctttttcaatcgcaaaacgaatacttatccacagtcagattgacgaaagaacgattttgggaaattcgctttttttctatgtttttgttatactctttcataagaaagagaggttttcttatggacatcgatttaaaagaagaattgaaaaaacgtgataaacttctcgctggttacctcaaacagattgagatacaagaggaatttatccaaaaacaaaaggaaatgattgaatatctggaagatcatatttcaaagatcacagacattatcagtggcgtttaatgacaactgtgccggaggaaaacgtatgcctgatacttatgattacatcacactcatgtgccggctaaaagccgcacagacaaggaataaagagctggaatccggtgagagatatgtcaaactgaaagaactccaccagaaggattgcagagactatgaacataaaattctggaactgcagacagaactagcggaagcgcataaagaaactatccgtgtccgtaattactggttccaggtattggaggatatgctcctggagtttgaagcgatgcagaaaaaagccgaacggaagctaaaggagatggagaagcgtgtcctttttgcccaaaaacaaagagatgatgctttagataaagtaaaagagctccgccttcagttttataaaacagcagccaggctggaagaagaacagggaaaaaacttgaaacttcgcgcacaaatcaaccgggattatgaaaattcttctattccttcttcaaaggtcctccgccgaaaaaagattacaaacagcagagaaaaaacgggcaggaaaccgggaggacagcccggtcataaggggcacagccgaaagaaacaggaacctacgcggccggcaatccttcttccaccgccagaagaagtccttaaagactgtgcttttaaaaagactgcaaggacaatcataaaacaactggtaagggtccgtatggttctggatgtaacggaataccatgcagatgtttattataacagtcagacgggagaacgtgtacatgctgcatttccggatggcgtgattgatgatgtgaattatgatggcagcatccgggcgtttctgtttcttttaaataatgactgctgtacttccattgataagagcagaaaattcctgtcggatttaacaggtggaaaactgaatatttcgaaaggaatgataagtaaactcagcagggagtttgctttaaaaacagagtctgaacgcagaactgcctacgcagagatgctgctttcccctgtcatgcatacagactgtacaaatgcaagggaaaacggaaagaactgtcaggtatatgtctgtgtgacaccggacggaaaagccctatactttgcacgtgagaaaaaagggcatgaaggggtaaaaggtactgtcacggaggattatcagggaattctggtccatgaccatgatcttaccttttatcattatggagcaaatcatcaggaatgtcttgctcatgtactgcgttatctgaaagacagtatagataacgaaccggagcgcacttggaacaaagaaatgcgttcactggtacaggaaatgatccatttccgaaaaggcttccagccgccccaggagccggatctgaaaaaggtttccgaatttgaaaaaagatatcagaagatactggaaaccgccagaaaggaatacagggacattccggcaaatgattattatagagacgggtataatttatttttgagaatggagaaatacatgcagaattatctgctgttcttgcataactccagagtacctgccacgaataacgaagccgaacggcttctgaggaattataagcggaaacaggcgcaggacgtgacatttaggggtttcgaaagtatcgattatttctgccaatgcatgagcatgcttgttttgatgcgcttggaagaatcggcaaatatatttgacagagtgtccaagatatttggataaagaaaatcgatggctttgactgttatcagtctacaccatcggttttcttaagtccagttaacctctgaacagtaacggctggcatccccttcagtcttttcaccaggcgcggatattgacaaaaatgtgtgggggggggggggtaaaataaaatgacataaatcttcaaaatctgcacaaaatagggagcaatcaacaattttgttgaaaaatgtccggatctgtagtaggataaaaggagaaatatttagggaaaaggaataggatgaaaaaagatgaaggggaagaagagagtacatgcttttaaaaacaggatggaacactggcaagttgtatcaatagggttgacagtttatgacgctattgctatgatacttgctttttttatggcattatggttccggtttgattgccgttatacgatgataccgaaagagtatttgaatttctattttaagtttattttaatttacgctgtgatttcaatctttgtgttcagaaagatgcgtctctataatagcatctggagatttgcaagctacagcgagttgcttaggacggttgtggcaaccggaattacatttgtgatccactgtgtgggaatgaatgtatttttcgggaagatgccactttcttattatgtattcggaattatgattcagtttgtgctgacgctgggagtgcgtttttcttaccggtttgtactgcttgagagaagccggcagagaaaggcagaggagatcgcgaaggcgaagaaggtacttctgatcggtgcgggcaaggcaggtcagatgatcctgcgtgatatcaagacagccaaagagctggaggatatcgtatgttgtattattgatgataacccgaataaatggggcagatatatcgaaggagttcctgtggtcgggggaagagatgatattctctcctgtgtcgaacgattcaagatcgagaagatcgttgtggcaattccgagtgcgacagcgcaggagaagcgggatatcctgaacatctgtaaagagaccgggtgtgagctgaagaacctgccgggtatctatcagttcctgaccggtgaggtgcgtgtcagtgcgctgaaagacgtagcagtggaggatcttctgggacgtgatccgatcaaagtcaatatgcaggagatcaatgcctttatccaagacaaaaaggtcatggtaacaggtggaggcggaagtattggttcgggtctttgtcgtctgattgcagagtaccatccgaaacagttgatcatctttgatatttatgagaacaatgcatatgatatacagcaagagttaaagaaaaagtatcctgaactggatctggttgtattgatcgggtctatccgtgactctagaaggatcaatgcggtatttgagacctatcgtccggatattgtctaccatgcagcagcacataagcatgttccgctgatggaggacagtccatgtgagtctattaagaataatgcgatcggtacttacaagacagcttatgcggcaatgatgaacggctgtcagagatttgttctgattagtacagataaagcggtgaatccgacgaatatcatgggcgccagcaagcgtctctgtgagatgatcgtacagtcctttgatcgtatgatcaaagagaagacaccggaaagactgccgattctctatgcacatgcagatgatgaagacggagctatggtgaaaaaacatgtcttttcgaaagatatcaagacagaatttgtggcagttcggtttggaaatgtacttggaagtaatggttctgtcatcccattgtttaaaaaacagattgcatcaggcggaccggtgacggttacgcatccggatatcatccgctactttatgacgattccggaagcagtcagcctggtattacaggccggcacttatgcaaagggtggagagatttttgttctggacatgggaagtccggtcaagatcgatacactggcgagaaacctgatcaagttgtcaggactaaaaccggatattgacattaagatagaatacatcggattgagaccgggagagaaactttatgaagaaaagctgatggcagaagaggggctgaagaaaactccgaatgatttgatccatatcggatgcccgattcctttcgaggtggaaggttttctgaagcaccttcagtctctgatggaaatggcgtatgcaaatgacgaacatatcagagaaaaggtttctgagattgtaacaacgtatcatccggcaggggaacacggcagcgagaaaaaaggcgaagtgtatgaaaggctgctgggtggaaagacagcagagaatggacagaaataaatacatccgattattcccgaatgacagtagagactgccattcgggaatctgatgtaaaacggaaacagaattcggggtcaggtatcgcgaaatggcgaagcacactcttttttaggagagatagtatgtggtatgtaatccaagtagtgacgggaaaagaagaagagacaaagaatgtgatcgacaaagaactgagcagacagttttttgaagattgtttctatataagacgagaacgggtatggagacgagatgggcagtgtattgttcatctggaaacgatgttcccggggtatctcttcatcagtactgaccagccagaggaggtatacacaaaattaaaagcaattcctcagattacaaaacttctccggtcagaagaagatatctttttaactgtctctcaggaagaaagagaatttcttgagaatcttctggatgaagatccggaggacgttgtgagattgtcaaaagtgacggtgaatgaagaaaaagagattcttactgcagaaggtccgctcagacattatgtggattggattgtcaagaaaaagttgaggctgcgatatgtgatgatcgaaatggagttatttgaaaagaaacgagaaatattgatagggataaagttgtaggatttccgatggagggagtcctttttctatggagggatgagattatgtttaatgaaaaaaatcagtttgaagtatttgtattaaaggttgggcatgggggattagaggggaagaaagtgatggtgatataaaagggacaacaaagcagaagttcttagtttatgtggatttcgaggttatagaaatatactaaactatgccaaaagtcaatggtaataatatttcaacttatgatatggattctatagatataaagattttaaagttataaggagtaaaaaagatgtccaatattgatacaaaaaatgaaattttaaaaagaaatattccctttagccctccggatattagcgaattagagattgctgaagttgcagaggcgcttcgctctggttggattacaactggaccgagaacaaaagaattggaaagaagacttgcagagtattgtcatacttcaagagcagtttgcttaaattctgcaacagcagcggaagaattaaactttagaatttgtggtatcggggatggagatgaagtaatagtaccttcatatacatatactgccagtgcttcagcagcaattcattgtggggcaaaagtaatctttgtagatagtcaaaaagatagcactgaaatggattacgataaagttgcagaggtaattactgaaaaaaccaaagcagttgtagcggtagatttgggcggtatcatttgtgattacgataaattgtatgctgctgttgagagcaagaaacatttgtttagagctaaagaaggtgatagccttggggcaagaattcagcagtctatcggtagggtaattgtgttcgctgattgtgctcatgcgttgggggcaagcagaaatggaaagatggctggtgagattgctgacttcagtgatttctcattccatgctgtgaaaaactttactacagcagaggggggagcaagtacttggagagatatcaaaggaattgatactgaggagatttataaacagttccaattatacagtttacatggacaaagtaaagatgctcttgtgaaaactcagcttggtgcttgggaatatgacatcgtaggtccttggtataaatgcaatatgacagatatcatggctgccattggacttcgacagttagacagatatccgggaatgcttgcaagacgtagtgatattataaaaaaatacgatgcaatgtgtgatgaacttggggtaaaacatttagttcatagtggagaagattttcaatcctcaaatcatttatatttgactcgcattccggggattaatgatgaagttagaagagagattatcattaagctagctgagcgaggggtaagtacaaatgttcattacaaaccactcccaatgatgactgcatataaggaaatgggatgggatattaaagattttccaaattcttatgattactatgcgaacctaattacacttcctcttcatacaaaacttaatgatgaagatgttgactacattatcaaaaatttcagggatgtagtgaaagaatacatctaaagcaggagagtttgtgatgctaaaaaaatgggatgaattgcctgattttatgagaagtgacgaagttaggccgtattatgatattttaaaaagaaaaaaagtaagtcttgttctaaaaagattaatggatttaataggtggcttaattttacttgtcttattggctattcctatggctgttattgctgtatggataaagtttgactccaaaggtcctgttttttatcgacaggaacgagttactatatatggaaaacactttaagattcacaaatttcgtacaatggtgaataatgcagatagaataggagccactgtgacagttggtaatgatagccgtattacaaaggtcggagccaaattaagaggttgtcgtttggatgaattacctcaagtattagatctgattagtggagatagcggtataataggaacaaccaagaaaaaccttgattttacaagggtttcgctggcttagtcgaattttgttatgataatttttctttgtgttgtgtcgattgagcaggggaacaaatataaaagaatggtttcttggatgcttattttgacccacactataagcggaaaaattatgataaggaggtttgacctagcctgcggatgctctttaaaaagaacattcacaggctaggtgtcgtgttaaagaacttacctaataaaaacaaataattatgaggagcgtgttgaaaatgggaagaaaattattaattgtagcctctaaaagatatggagattatgtaaaagagatagcagagtcaatgggttgctttgaggaaatctcctttgtagataatgacagagaaggagctattggaaaactggaggatgtggaaagtttttatccggaatataactgtgcaatagctgcatgtgacgatggaacagaaagacttgagtggaataaaaagttggagacactttacaatattccggttttatttcatatggattctactatttctccatcagctaatttaatgcctggctgtattgttgagccaagggctgttgtcggctgtggaagtactattgggcaggcaacggtcattggtgccaatagtgtagtagagccatattgccttgttggagatggctgtacattaaaatcgggaacaattgtgaaatcaacaagtatggttgcaatgaacacaagcacagaacaaggaagtgttctgtctacatcattaacaaaggaatgataaggttcaataattataggaaggatgaaaccgccctgattttcgtggggggggggggggggtacacgatgaatagtacaaatgaaacaaagatggatatgaaacaggcaaaacaaaataacacgccaaacatacgctggacgcttgtcgggtatgatttgattgtatatgcattagtagcagttatactcctggtgttatatggaggaatggataaattatcaactgttgggatcttccaacaagtaggtctttctgtcctgtgtattttcacagcacgtctaataggtaaaatttacgggcaagtatggagatatggtgggattcagtgctatatccgcttgctgtttactgattctattgcttttgtagcgtatctatgtctggaactcttgcttccagttcaaaaaattacatttgcaagattactttcattggttagcttgaatttattaggagcattagcacttcgcatgatgtatcgctatgcatacaaatgtggaaaccaggagacaacaagaggaaaaattctttctatattattacatatattttcaggcattgaagctggaaatgaaaaagaagtgcagaagatcaaagttgcaattattggtgctggacgagttggtgtgagtttggcagaagaacttttgaacaattcagaagcagcgtatgtaccaagatgttttattgatattaatagggaaaaagttggacgagatatacatggcattccggtttggtctgaaacggaagcaacttttaagaagctaggcgaatttgaagttcaggaaatcatttttgcaattccatcaatggatgcagctaaaaagaaaagtctttatgagtattacaagaatgcaggatacaaattaaaagtatatgattatccgactatgtatgtggcaggaggaaaacgtcatcttcgagaatttgatatagaagaacttttatttagaaaacctctggttgtttcggatgaacgtaccaatgcatattacaaagataaagtcgtattgatcacaggtggcggcggttctattgggtcagagctgtgccgacagttagccaagatgaatccgaagaagatcattatcttagatatttatgaaaatggtgcatatgatgttcagcaggaattgaagatagcatatggaaataaactggatctgcaaattgaaatttgttccatcactcatagaaaagctcttgaaagagtatttgaaaaatatcatccacagatcattatcaatgcagccgctcacaagcatgtcccattgatggagcataactgtgtagaagccatttacaacaatgtatttggtacacagaatctggtggaactttgtgaggagtatggtgcagaacgctttatgatggtatcaacggataaagcagttaatcctacaaatgtcatgggtgcaactaagagaatgtgcgagatgattgttcagagcgcaagtactcatggaaaagtaaaatacagtgctacacgtttcggaaatgtacttggcagtgccggatcagttattccattattcaaacgccagattgctaatggtggaccggttacagttacagataagcgaatcatcagatactttatgacaattccggaagcatcacagcttgttctccagagtggtgcgattgccaataatggagagctgtttgttcttgacatgggacagccagtaaagattatggatctggcagagaatatgattcgtctttctggtgtacagggaattgaaattattgaaactggattaagaccgggagaaaaactctatgaggagttgttagttagtgtctgctgagcaaactgaaaacacttgattttactgacttttgccccattttctggtataatgattgcaaggattttgacaaaaacaaatcgtttttcttgcagttttcttacagattttaagtataaaggggctaaaacaatgtacaaaccgatcgacaagttacagcattcattcctcgatttcaaccaacctatgggactccacatgaatccggataaccgctgggtcagactggctgaccgaatcccatgggatgaattcgaagtaaaatatgccaagctgtttccaagtgatacgggtaatgttgccaggcctcttcgcatggcattaggagccctgatcatccagaccaagttccaattttccgaccgtgagcttgtggaacagatcgctgagaatccgtatctgcaatactttatcgggcttcccggttttcgggaagaagctccgtttgatgcaagtacactggttcttttccgtaaacgcatttcagcagatatgctgatggaagtaaatgagtatcttcttgctcacaaggaggatgacaaagatgaccatactcctccatccgtaggaaaatccggtgatgatggtactgcaaaagaagatacaaacaaagggactctgacacttgatgcaacctgcgcacctgcaaacatacgttatccgcaggacatctcgcttttgaacgaagcaagagaaaagctggaaaacatgatttactgtttttgtaaatgttatggtcttaagttgccaagaagataccgcaaacgtgccagaaaagagtatcttgcatttgccaagagcagaaagcacacggcaaagaaaatccgcagcgcactccgcagacagcttggctacgtgaaaagagatcttggctatctggaacagttcatgagtgatggatacgccatgacaggtaaggatatcggcctatatcttaccatcatcaggctgtatgaacagcaacagtatatgtacgataacagaatccattctgtggagcatcgcattgtaagcatttcgcagccatggcttcggccgattgtcagagggaaggtcaaagcacctgttgaatttggcgcaaaatttgatctcagtcttgacagcgaaggttatgggcgcctcgaaaaaatatctttcgaggcatacaacgagagcacctgcctgattgaagcaatagaacgcttcaaagagcgtaccggttattatccagaacgtgtcctggcagatcagatataccggaccagggaaaacaggagttattgcaaggagcatgggatccggttatcaggtccaaagctgggcagaccaagcgccacagcaaaagttgataaaaaacaagagtatcaggataataccgatagaatcgaagtggagcgcaccttcagcctgagcaaacgctgttatggtatgagctgcattaccacaaaactggaagaaacgcagttgacatctatcgcattatctgtattcgtgacgaatctgttcaggattcagaggcgaatactttgtgctcttttgcatctgttccgattctggtatgaccggaacagatataagagttggaagttacagatagctgcttaatcagcagacactagttaagacagaggaattggataaaacagacaacagcctgatctttattgaaagagatacagcattaagcaaagaagaaatatatagaaaaattgacgtgcttagaaatgcctgtgacacaggggatgatctgattgcaaaagaagcgttaagatcggttgttccaacattcaagacaccggaagaagtaaataaagaaatcgcataaagaaatgtaactattacaaagaacaatatagaacaagagggaatagatcatgtttaaagagagtaacaacttcaaaaaatttgaatcaaaagtatggttaagcagtccgaccatgcatggcccggaaatcgaatatgtaaaagaagcatatgaaactaactggatgtcaacagttggaaaaaatatcaatgaagtggaaagacttgcctgcgaatatattggatgcaaacatgcagttgcattatctgccggaacagcttctttgcacttatctatgaagttggcaggaattgaagcatatggaatgccaaaggtaggtcatggggcattagaagggaaaaaagtattttgctcggatatgacatttgacgctactgtaaatccaattgtatacgagggtggagaaccagtatttattgatacagaatatgatacttggaatatggatccggtagcgttggaaaaggcttttgagatttatccggataccaaaatagtagtcatagcacacctttatggaacaccgggaaaaattgatgaactgaatgcaattattaaaaaacatggtgcaattctggtagaagatgcagcagaatctatgggagctacatacaaaggtgttcagactggaacattcgggaaatataatacaatttctttcaatggaaacaagattattacaggaagctcaggtggatgtttcctgacaaatgatgaagaagctgcaaataaggttcgtaaatggtctactcaggcgagagaaaatgcagcatggtatcagcatgaagaactgggttataactaccgcatgagtaatgtagtagctggtgtggttcgtggacagttcccgtatctggatgaacatattgcacagaaaaaagcaatctacgaaagatacaaagagggattaaaggatttgccagtatccatgaacccaatggatctggaaaattcagaaccaaactactggctttcctgcttgattgttgatgaagatgcaatgtgcaaacaggttcgtggagagcaggatgtctgctatgtcaaagaagccggaaaaacgtgtccgactgaaattctggaggcaattgcatctattaatgcagagggcagaccgatttggaaaccaatgcatatgcagccaatttatcgtttaaatccatttgttgtcagagatggtaatggacgtgcaagatcaaatgcgtatattgctggtggtgcagctgatgtaggaatggatatttttgcaagaggattatgtctgccaagtgataataaaatgactgcggagcagcaggatagaattattgaagtgattagagcttgttttgagtagaaatatattgtgggagagattatagtgtcaaagaaaaaagtagttggaattatagcatcatctattgttgctggaacagcggtagtgacttggattatgaagaaaaaagcggaaaaaacctcttataaagctgaaagcatagaagcaattccgacacgtgaaatgggattttatgagaaatacgttaaaagagcaatagatattgtttgtgcatcagcagcgattatatgttttagtccattatatataggtgttgcaattcttgtcagattcaaacttggaagtccggtattgtttactcaggaccgtccaggtctgattggagaagatggcaaagaaactatttttaaaatgtataaatttcgtactatgacagacgaaagagacgaaaatggagagcttttgccagatgaggtgcggttaacctcatttggcaagtggcttagaagtacaagtcttgatgaacttccagaggcttttaatattttaaatgggacactttcggtttgtggtccgcgtccacaactggtcagagatcttacgtttatgacaaaggaacaacgtatgcgtcacactgcaaaaccagggttgagtggattggcgcaggtgaatggaagaaatgcaattaagtgggaagataaattggactgggatttgaagtacatagaaaatgtgtcattgttagaagatttaggtattatcttaaaaactgtaaaaactgcttttattaagcaggagggaattacagatggagatatggcaacagcagaagactttggtgactatttattgaataatggaaaggtgagtcaagaagattacaataataaacaaatgaaagcaaagaaaattttaaatcaggaaagtgatgttaaagaagatgttaaagtagatagaaatcatcatgtacctttttccgtggctatgtcagtatataaaagtgataatcccgatttttttgatagagcacttagtagtattactgatgagcaaacgattaaaccaaatgaaattgtattagttgtggatggcccggtaagtaacgagataaataatgttattaataaatatgaaaaaaagtatgaagtatttaatgttatacgattagaacaaaatggtggcttgggaaatgcgttaaaaatcgcagttgaaaatgcaactcatgaactaattgctcgaatggacagcgatgatgtgtctgtttctacacgatttgaagaacaattaaaatattttgaaataaatcctgagatagatattgtgggaggagatataacagaatttatcggagaagaaaataatattgttgggaaaagatctgttccattatctaacgaatctataagagaatatatgaaaacacgttgtgctatgaatcatgtttcagtcatgtataaaaagaaagcagtggaaagtgctggcggataccaagattggttttggaatgaagattattatctatggataagaatgtggttaaatggagcagtattcgcaaatacaggaagcgtgcttgtgaatgttcgggtcggtgaagaaatgtatcaacgacgaggaggttcaaagtattttgagagtgaaaaaggacttcaggattatatgctgaagaataagatgattaatcattcgacatatataaaaaatgtaactaagaggttgattattcaaaaattgatgcctaacaagctaagaggttgggtatttagaacatttgcgaggaaaaaagtatcatgaagtatgtagaaggtcttgtcagtgttattatgccgacttacaagcgctcagaaaaattactcagagcaatagacagtgtattgaatcagacatataaaaatttagaattgttactagtaaatgataatgagccatttgatgaatatacggaattgttgaaaaaaagagtagagaaatattcgaatgatgaaagattccatctgattcttcaggataaacatattaatggcgcagttgcaagaaatgtaggtattcgccaggcaagaggacagtatattgcttttttggatgatgatgactggtgggaactgaataaactggaagaacaggtaaaagaactaaagtctcttgatgatagttggggagcggtgtcatgtaagtttacattgtatgatcagaatggaaatgttataggaaaaacaaagaaatatagagacggatatatttataaagatatattaaatcttatgtcagatgttgcaaccggcacattgcttataagacatgactattttgatacaactagatatttcgatgaaaacttgttgagacatcaagatttgcaacttttagtagactttacatcaaaatataaattaaaagaagtaaatcaatatttgcattgtgtggatgtttcagacacgcaaaacagaccagatgctcataagttaatacaatataaaaaagctttttttagatctataaagcctgtaatggcttcgttaagcgaaaaagaaagaaaatgtatttatgcaatgcataagtacgaattgggctatgtatgtctgaagaatggcgaaaaacgtcagggattaggatattgtaaagcggtattgagtagcccgaaggcatgtagattagctttacagaaaactattgtgaaaattattcagatttgtaaaagataagtttagaaagttgtagatgttaggagaaaatattatgattcaatctaaagcagatttaagggagtatctagaggcagatcgaattcatttaggatatagatataagaaacctaaactaagagatattgtatggcgatatgaaatttatttacgaaaaagtgaatattataacaacgtatcgggggggggcatttcataaaatagcaggtaaatattataaagcattgtggaatatattaggtttattgtgtggattttcaattgggctaaattgctttgaaaagggcttgagcatatcacatattggtacaatagtagtaaatcatgaagcgaaaataggggagaattgcagattgcatgtgtgtacaaatattggaactggatcacctaaaataggaaataatgtttatataggacctggcgcaaaaatttttggaaaaatccaagtcgcagatggaactcagattggagccaatgcagttgtaaataaagactttcttgaagtaaatagaacgattgttggagttccagcgcattatgttgaaaagtaaattagaaaatttagtgaggaaattaatataatggaagaattggttagcatagttgttcctgtatataatatgggaacaagtattaaaatatgcgttgaatcattgataaagcaaagttacaaaaatatagagattcttcttgttgatgatggatcaacagataatagtctacaagtgtgtaaaaaatttgaagaagtagataagagggtacgtgtctttcatactgagaatcatgggggtggtccggccagaaattatggaataaaaaatgctaagggaagatatatatgttttccggatgctgatgacttatatgaagaaaatgcagtttcagcaatggtgcaagctatgagcaatggaataaacgattttgttgttgctggttttacatcgctggatggaaatggaaaaaaggttacagaaaggagctataaggatagagaagtatcaggtatccaaatgaggagcaattacaataaatatattggcgaaaatgaagaatttggaataaatggggctccgtggaataaattatatgatttaaaaattattcgagaaaatcagatagaatttcctgagttacggcgacaccaagacaccgcattcatattcatgtatttatgccatgtaaataatgttcatttcatagaagaaaatgtatatattcattatgtgaatgacttgagaaaagaatgggataaatatccgatcaattatatagaatcagttgttggattaagaaaaatacaggaaaagactgtatttacttggaatacagataataaaattgtctttgataagttaaatcaaggatacatttcaaatactataaaagctatagaattgtcattatctcatagattcaaaatgaaacattatgaaagagttgaatatataaaaaatgtggtggaatatagccaaattttatcaatagaagttcctaggtgtctaggaaagtatcaaaatatactcctaaataaattaagaaaaaagaaatatatacaagtattatttataattcatttaaaagtatttgtggaaaaaagaggaggattatttttgataaagaaattttaaggagtaattaagatggaatatcagactatatacaataaggaaaatacacgtataaaatttttagcttttgtaataataatgcccgcttatatagatgtacttaatgtattacttaatacaatagggattggaatgacatctgtggttactgcttgtatatatatatatgttcttatatctttgattttaaaatgtggaataagaaaaattgattttttctatttgataggattttatcttgtttttttattgaattatgtatttttttcgagtacaagaagcgaaatgctttcgcaaggaatgataattgtatatattttttttattccatatgggttgtttagcttcaaaaatgttgtgaattgggatagctttttttcgtacttatacaaatatgcaaaatgggcaattatatctggtggcatgatgctgttgtttttaccttatgataaatatttaggatatatggattattcgtattcgttgttaccggctgtatgtgcagcatattactatcaagcgaaaggaaaaaatattgaagaagaaaaaacgtcatcattcataccgatgattatgtttgtggcgggaataattgaaatggcggtatttggggctagatccggtatcttatatgcagtgctatttgttggagtattagaattattgagaaaagatatatcaatacaaaaaaaattgcttatatgcggtgtgcttgttattggtggcatgattggtgttttctatttagatgatattttatatttggtatctaaacttccgtatttcgaaaattcttatttggttcgtagttttctaaaaggaaaattatttaatactgatactagacaagttatatggcaaagttgttttgaacgacttaatacgatggggatggatgtaactggattttttggagatagaccgtattgtgcgggagctgtttatccacataatattgtactcgaaattttgatgtcttggggctggattattggtggatgtatattagcgtatttactctggttgattataagaggattgacgtgtaaaggattaaaacgagatgtgtgtatttttattattttctcttgtttatccagattttttatgtcaggaacttatataagagaaggaaaattttggattacagtatttgttttagttgcactaggaaaaggaaaaaagaaggcgaataattagatgagtagagaaaaaaatttaataaaaaatacagcaatactatcgctaggaacgtttgttcctaaatttattactgtatttatcactccaatattaacagcaaaattaactaaagcagagtatggaagttatgatttagtaattacgctggtagctttattacttccggcaacaacgttgcaaattagttcagctgcatttagatttttgatagatcaaaaagatgataatttaaaatgtaaaaaaataattagtagtatttttacatttgtggtggtaacttccgtaattacatgcttactttattatgtcttgtcaggaaaaaaattgggccatataggtatattagtatgtttctactttgtatcggatatattgatgattgcggctcaacaagtaatgcgaggcatggggaaaaatctatattattcttttagcactataataaaagccattttggatatcagtatgattattatattgcttggagtacttgggacaaagaattttggattgctgggtgttatgttatctatgtcaatttctgcctttgctagttttatttttctattaatcaagggagagataattaagttttataacattaaatatttcgatataaacactttaaaagagctattaaagtattcatggccaatggttcccaataatttatcaaattgggtattgagggtatctgataaagtggttataactgcagcgttaggagtagaagctaatgcaatatatgctgtagcaactaaattgcctacgattttcgattcattacaaggaacttttacacttgcatggcaagaaaatgcttcaattgcttcaaaagatgatgataaagacagatactattctgttatgtgtacaaatgtatataacatatttgttgggttaatgtctggattgataatgactacgccgattgtatggaaaattcttattcgaggagattatgaatctgcttattatcaattacctgtattatatataggcatgcttttttcaagctttgcagctacaattggcgggatttatatagcacatatgaaaactaaaagtgtaggaataactacgacaattgcagctgtaataaatttattaattgatattttgtttgtaaaaaaaattggaatttgggcgggatcaatatcaactatgataagctatttagtattagtcatctatagaatgtatgatgttcaaaaatttcaaaaaatacgatttgaaataaaaaaaatgatcctgggtattgtgatgctatctataatggcaatatgtagttatcaaaaaaaaatagcgtttgatttaattaatattttaatatgtattttggtcctttttgtgttcgataaggatattataataattatattcaaagctttattcaataagaaaatagaaaaaaataaaaagaaggattaattatgcaagaaagagagagtattatttttattacaaaagatgctttttgtaaagattatttaccttgttacggaaatcaatattggagtggacatactccgaatattgataaacttgtagaaaatggctctgtgtttagaaagtattatacaggagctccctcgacagttatgtctaatatgtgtatgtttactggattatatgcacatgaaagtgaactgagtcgctatgtattatctggaatacattatcaaggagaaactttgtggacaaaggctgaagctaaaggatatgagtgtcatattatatgggatgaagcatggcattctgtatttaagatggaagaacgttattattgttatggtgaaaatacgaaaattcataatttaaaagaaatacgtcaaggagtaggtgctcactatctacatggagattcattaaaacgagatgacagtaagacggaatatgtttacaaaacaatcgaaaatgaaataaaaaaaataaaaaaagaggcagaaaaaccaatatttctttggatgcatataccacatgtaatcaatggcagaactggttatggaactgacatagatgcatttgatcatatagtagggattgcaagaaatgaatttaaagatactaatatttttattgcagcagatcatggaaatatgaatggtatgaaaggaaaaattagttacggtcatgacgtatacgagacggcagttaatataccgttgattgcgccaagaatagatgaaaaaagaataatagataatttagtatccaatattgatatatctacgattatttttgaacgtaaaattcctgagagagacgttgtatatagtgatagtacattctatgcacagccaaatagaaaacttgctattataacaaaagattacaaatatatatataataagcattcaaaaaaagaggaattatatgatttaagaactgacccggaagaaaattgtaatcttattagcgatacaatttatgatgtagatcgtcatgtaaaaacacctttaagagaattatatttctatccatattgggaagaacttgaagaggtacgtaggtattttagaaaagaaaaaaacaaaatttggaaaacaggaacttttaaagaagaatttatacctacattaaaatatcaggtgaagacacatggttattatcaattgacacagatgttatcaaagttgaagtcaaaaaaataaataaaaagacgaggagctgagtaggatgaaaaaaaatgcaataatattggcagctggaaaatcatcgcgatttgcaccatttacttatgaaaaacccaaaggtctattttgtgttaaaggtcaaatccttattgaacgacaaattgaacaattaatcgaagctggaatagatgaaatttatattgtcgtaggatatatgaaagaaaagttcttttatctggaacaaaagtatggagttaaattaattgtaaataatgagtttggaaaaaaaggaaatttatatacattatacgttgcaagagagcatttaaaaaatacgtttatttgttgtgcggatcactattttgtaaggaatccatttcttgatcctaatcaggaaaatctatcttatcgtgcctgcgtatttcagaaaggaaaatttcgcgaattttctgcaagtgtatctgatgcaaaggttataacggacatgtctgttggaggatgtgattcatatgcaatggtaggacaagcatacatgaatcagaacttttcggaaaaattcagagagtatatggaagatgaaattaatgattttggaattgcatccatgttttgggaagaattctatcagaaacatataaaagatctgacattttttatgaaagagtattcggaaaatgcaattttggaatttgaaaatattgatgatctgagagcatttgattcagaatttcttctcaatgttgattcggaaattattgctaatatttgtgatactttgaaatgtgagcctaatgagataaaagatattgatgtaataaatgcaggacttacgaatgtttcgttttcattctctgttggaaaagaaaaatatgtatatcgccatcccggtgggactgcgggtaatttaattaatcgccaaactgaatattttgcacagacagcagcaaagaatatagggattgataaatcgtttataaaaatggatatatctggttggaaaatatctcattttgtggaaaacgcacgtaattgcgactttgaaaagtcagatgagcagttaaaaatagctatggtttatttgcgtaagctacatgaggtagcacctgataatagtgtcaaggtatttgataatgttaaagagggtaaaaaactcatgaagatagcatctgcaacaaaaggtcatcttgaaaaggaatttacggagattattggaaaaatagatcgtttatatgattatattaagtctgatgcagaacggctaggatataatttggtattgtgtcacaatgacacatatgcaccaaattatttatatgataaagatgagaagatttatttaattgactgggagtatgcaggtctgaattatgcagcaaatgatataggttgtattttgtgtcgttatgattggacagaagaacagatagaaagatatttggaatattatttaggacataaacttacgaaagatgagagacgtttttattatgcgtttattccaatttcaggtttctactggttttgttggggattatataagggaagtgtgggagacgatgattcatttttcttcctacctagttatagaaatgtggtacggtttattgacagagcactggagagttatgaaaaatagaagttttgatggaaaggaaacaataaattagtatggttacagcaattattttggcaggtggtgtaggctcacgggttggagctggacgaccaaagcaatttgtagaagtattaggaaaacctgtattagcctatacgatagagatttttgaaaatcattctgatgtagatgcaatcgaaattgtatgtcataaggaatggaaagaatatctgataaatgacattataaaaaaatataactataaaaaagtaaagtggattacagaaggtggagaaacatttcaagagtcatgtataaatggtttgaataatttaaaaaatgaaatccaaaaagatgattatgtattaattcaatatggtgcagcaccgtttacaagtgaaaaaatcgtgacagatgtaataaaaaaaatgaaagaaaaaggttctgctgtcacagcaactccatgctaccaactcttaggcagcaatgatgaaaatggtgaaagcaaaacatgggtagatagagataaatacatacaaattgcatgcccgtatggttttaagtatgattatttgctagatatttataatagagcggaacaacaatcattattgcagacgattgagccacatactacttcacttatgtatgcattgggagacactatttatcaggcatatggagatcagaccaacattaagataactacaaaggaagacctagatttatttgagggatatgttttaatgaagaaatatagaaaatcagaaaacaaatagaaagaaggaaaagtatgaaaatagcagtagcaggaacaggatatgtgggattatctattgccacacttttatctcaaaatcatgaggtaatggcagtagatattattccagagaaagttgagaaaattaataaaagaatcagtccaattcaggatgagtatattgagaaatacttaaaggaaaaagaactgaatcttacagccacattagatgccgaattagcatataaggatgcagattttgttgtgattgcagcgccaacgaactatgacagcaagaaaaatttctttgatacatcagcagttgaagcggtcattaagctggttattgaatataatccggacgcaattatggttattaaatcaacaattccagtaggttataccgcaagtatcagagaaaaattccactgtgataatattatctttagcccggaatttttacgtgagtcaaaggcgttgtatgacaatctgtatccatcaagaattattgtaggaacagatattgaaaatgccagactcgtaaaggcagcgaatacatttgttggattactgcaggaaggggctattaaagagaatattgatactctgattatgggattcacagaagcagaggcagtaaaattatttgctaatacatatctggcactcagagtttcttactttaatgaactggatacttatgcagagatgaaaggacttaatacacagcagatcattaatggtgtgtgccttgatcccagaattggttcccattataataatccgtcatttggctatggtggatattgcttgccgaaggatacaaagcagcttttggcaaactatgaagatgttccgcagaacatgatgtctgcaatcgttgaatctaacagaaccagaaaagactttattgcagatcgagttcttcagaaagctgggtattatgcatatgaggatgagaatacttatgatgctactctggagaaagaagttgtgattggcgtatatcgtcttactatgaaatctaattcagataatttccgtcagtcctcaatacagggagttatgaaacgaatcaaagcgaaaggagcttctgttatcatttatgaaccaacactggaagatggaagtactttctttggtagcaaggttgtaaatgatttggagaaatttaaggaacagagtcaggcaattattgcaaatagatatgacagttgtttggatgatgtgaaagataaagtttatacaagagacttatatggtcgagactaaaaaatgcaaatgaattggatggaggttgagttggtatatgaaaagtaatccacttgttaagataaatgaattaatagaacaggactatttgattgttgttgatacgaatgtattgcttggattatatcgactttctccggactatgctgattttgcattgaaatgtttagaaaaaataaagagttttattcgaataccatatgttgtagcattagaattttcaaggcataatagaaagctgtataaagacagacagctttctataaaaaattctataagtgataatctaaccatgatagagaatcataaaaagaaagtcttgaatgcgattgctgtattggaaaaaagaaattttccagaaattgacgaattacttaattctgttggagcttgttatgataaggcaacctctttattggatgattattttgatgagcatagtgttcttactctgataaatgatacatggaattctgatttacctgaagattttttagatgaattacaaaataatcaacagattatggctccactggaactctctgaaatctatggtatatgtgatgatggcgaaaaacgttataaaaaagaaaatcctccaggatataaggacgcaaagaaaaaagacgggattagaaaatatagtgatttaatctggtggaaagaagtcattcagtatgcaagaaaaagtagaaaaaatattgtccttgtaacggatgacgtgaaagaagactggtggacgattgatgagaagggacagtatctgtttcgaggcgagttgattacagagtttgaaaaggaaacaaaaattagggcaaatcagaatcagggaactcagctggaatcgctaaaattgataccatttatatcatcagatttttacacagcagttgcaaatagttataatatagaaaaagctgatgcgattgggctggcaatgaatcttacggataagagttacatatcgcatattcaggaaaaagtctttgatgatattttagatgatcttattttctcaggtactcagtacgtgaatgacacggtaacatatgtaggaactgaaggaattgaatcttgggatttagaagattgtgagtttttaggatatgaaattgaatcaagggatggaaacacaatatattacaggttaaattattcggtatgcttgtcagggtattctcatgattattggggcagagatgaagatacaaaagctgtaatattatctgaaccattttatcatgaggtgaaaggtgaaattagtgtgcttgtatgccgagaggctgatttattgattgactatgaagaagatgacgattatgcaagtgcggaaatagaagaaggtgatctttcagaagtagtgtataaagattatcaatacgaaccggaaccagatccggaagcatatacgacatgctcggaatgcgggaaaccactatcagtttacaatgattttaatggtaaatgcccagagtgtgctgcattggaagattaatgggaggaataaggaatatggcaagattcaagagccttgcagatcaggcagattcacaggaagcaatttgcgattatatgtattacagagaagaaaacaaatatatgcatagagcacgtgtattaatttcttcctgtggaaagaaccaatataatagaatattaaatataattccagtaactattcagaaccagctttactcaaagatgaaatcagggtgacctgtgatcgcatttttgattgcttcgtaagcattgtatccctgtttatgtgccgtgcctacgtaggacatgatttttagataatctctggcaccttcctctgttcggaagcatccggatactttggtcttgacctttatcatccgaagatcacgttctgcctggttgttatcaaacgggacattgaagttatggataaaaaggcagactgaggccttgtaattcgtaaggcgttctacaagggcaaggatttttccttttttcttccgaccacgttttttctccgtggtttcgggaagtggattttccttccgaacctgttcgataagttcatcatactttttatcgaacttatgatagtgataatagctcagaaagtccttacctttctctacagctttgtctttgacctttttcatttccagtaaaaggtctataaatgcagatgcccacttctgctcaggatgattttcatcaatccccgttaattcacggagaagatgggcacagcagactgcatgctgaatatccggataattccagtaggaagcccagcagtcatgcatggcaatccctttgaattccgggagaacaccgcattgttccatgcctgcatttccacgtttgggactgatatcaagataggtgtactcacagtttgaggcatcatgaacccaccagagttttttatccactctggttcctgtttcatcgaaatgtccaagtgcggaaccgatcattttatccttgatcttacctactgtttcactcagactgtcagcgcatctttttaccatgctgctgatcgttcctgttgcaattggaatgttaaatactccggaaagaatctcatgggtgcgtttgatgctgactgcacctacggtatttaacgcaacagctaatgactgaaggttttcgccatactgtacggctgcttttacgtcagaagggaaagcacctctgcgtgtatctccatgcagcatacagattggaagttccagtgcctgatgctccgttacattgactgtaacaaccgcatcgataacatggcgtttctccgcaatgcatgcagtgcccttgcatatctgataatgtgggcatccttcacatgcggaaggcatatgtttgactattttatccggagctgttattaccgccaaatgtgttccctgatgtccgttctgtccaccaacctttttgccagatggttttcgcagactctttggggcaggctttttgaaaccatcacttgaaggtggtttggaactgtttttggagttcttattaagctgttcctttagttcctgtatcgtctgattgagttgagcgatcaactgtgtttgcgcattgatcgtagcattcagggaatctacagttgatgttagtgaattaacctgctgtaataactgcttattcatttcatcttttgtcaatcagaccaccttcttccgttaaaatttgatacttctattttaacggaaaatggggtaaaaagcgaatcgtaagatttttgcatactgtcaaaatgacggtggataaccagaaaaaatcagagattaaatgctgataacacctggataaaatccacaaaaatgctgttatctgggtaaaaccaaggagttatgtttcagtaatccacaaacccaaagtacttggcagctaaactgaaaaattatccacattttacactaaaacgatgacgaaacagaaattttattttctctgttttgccgaaaaatcaagatgtacttaacggggtactgaatagttactaattccagagataagtacaaatgatgcacatgtatatatagaaggggatgcacaatttgagagagactattatttagaatattctaataaatttcaggaattttcatttattagtggcacattgttgataaaggcaagggatcgttggggaaattcgattgaaattgatattactaatgaatcatgacagaaaatatataagaaatcaaaaattggtactggttttttacatattttgtagtaacggtaatataatagtctatctccctttctcatggccgatggggagaaacgagggcgaggggagattactctgtacccctcgtttggttatcgaatgattggattgacacgaaaaaggagaacgaatgaaggtctggattaaagcaggagtaatcatattttatgttctgatatattcttttttgaggaaacgtatgcgtagagattttataaaattttttaaagcaatgatgctattgatgatttttatactatctctgttaccagaagcaattataataaagcaattagggctggcttttcgagctgacactttgatattatggatggctggcatagaggcggtagatgcctgggatgaatatgaacgagagaagaataattataaaaagtatcgacggagcaaagtgaacagaaatgggaagaccaaaaaggaaaccagaatataattcggaaaagataatggaacagtttacgaactgtattgctgaagcatatatgtctggagcaggcgatggatcagcaaattcattacggcaaatatcagagcagttcagcattaccttaatgaagacacgtaaaatattaattacggcgggtgtgtatcatactgagcttagtgagcaggttatttcattaagagaaaatggaaaaaatatttcagagattatgcaggagactggtttgagcagatcttcggttcattcctatttgccgtatacaaaaatgatatacaatgcggatgaattaagcctgtatgcagagaggtgtagattgtaccggaaaagaaaacaggctgttgaaaaactgcattgctgcatcggtaaatcatatgaattactggaaaatcatttatgggagacgttaaaattgttttcaggctattcttttacgactgtaaagggattaagatttcattatacggtcaatggaaatgaaatcctgattgaccggaaaaagaaatcaataaccagaagcagtgtaaatattgctctgaaagaaacgatggagatgaagagaaatgtaaacggaccgaagaaattaaaggtttttggagcgagttatctgtacccgatatttttacggtttgatctgatcaaaactgaaagggaatagaatggatatttaccagatatggacaacgtataataaaaagtggtcaaaatatgagatattggcattcagcgtattgctgcttttgacagttattgtggtagcaggatgtgtatgtagaaaaaagattaatacaatgcaggcaatggctgttgtgatgatggtaatatttcttggaattgtgtttggatctacggtatttactaggacaagtactgttcgccagtatgaattggtaccgttctggtcatggaaggcaatttttaaatacaaagactgggaattgctaaaagaaaatttattgaactgtatattgctgcttcctgccggagcattattaccaataattgcaaatcataaagtgaaatggtgtcgagcattattgtttggagttctggtatcggcagtaatagaaaccagtcagttggtatttatgcgtggattattcgaatgggatgatatgattcataatggacttgggtgtatgatcggaagcatgataatcaatttttttatgaaaaataaaatcagggattgacgaacgtatgttctgatagtataatcataaatgtcagaaggaaaaaggaggtcagcactgatcctttggatagaatctatatggtaagcaacagtcaagtactgtttcgggatggcttatcagaaatgaataatccggcttccgtgtccatgctgtccggactcaggaaaccgcaaatccgtttttaaggaaaccgccattccggtggtggaaacctttatcataaattcttagaatgtaactatgcaccccgtggtgcaaatatattctaggaggtcttgactatgaccaaatatcgagagattcttaggctcaaaagcttgaatctcagtcaacaaaacattgccgacagttgcaatgtctcaaaaaagacagtcaatcgtgtgttaaagcgtgctgctgaattaggtatatcctggccgcttgaggaaaacgacaccgatgctgttcttgcagaaaagttcttcccttctgcaaaacaagtcacatcccacaagcgtatgcctgactacgactacatccgtaaggagctgctccgtaacggcgtaagcaaaaagctcctttggacggaatacatggaggattgccgtgccaatggcgatgaaccactcatgtattcacaattctgctaccacatccaacaggatgagcagaaacatcgtgctaccatgcatatcaaccgtaaacccagtgaacaggttgaagttgattgggcaggtgatcctgcaacaatcattgatccggataccggcgaaatcatcaaggcatatatatttgttggtgtaatgacttacagccagtatgcatacgtggaagcatttctggacatgaagcagaaatcatggattaatgcacatgtccatatgtacgagtactttggcggtgttgccaagattcttgtaccggataactgcaaaacggcagttgttcacaatggaggatggaaagaccagcagatcaatgaaacctatcaggaactagctgaacactatggcacagctattattccgtctcgtgtcagagctcccaaggataagccgaatgctgagggaacagtaggaaatatctctacttggattacagcagcacttcggaatgaacagttcttctctcttgcagaattaaatcgcgcaatcagagacaagctcgaactgttcaaccaaaggctctttcagaagaaagagggcagtcggcgaagcttatttcttgaggaagaaaaaccattactggcaccattacctgctacccgttttgaactgagtgactggaaaacagccaccgtccaatttaattatcacatatctgtggacggaatgctatactcagttccttatgaatacatcaaaaagaaagttgatgtaaaggtaacagataccactattgaaattttctacaaccataaccgcattgcttcccaccgtcgtctgaaaggacgccctgggcagtacagcacggtcacggaacatatgccggaagaccaccagaaatatctggaatggaacggcgaccggttccgcaaatgggctgagcggattggcataaatacgtacactgtggtcaatgcaatactgacctccaaacgtgtggaacaacagacctaccgaagttgtatgggacttctgaagcttgctgagaaatactcagatacattacttgaagcagcctgtaaaaaggctttatcctatacatcctcacccagttacaagagtattaaaaacatccttgtaactggttctgtaaaactggaatcagaagctactgaatccaagaccacacataaagcacacggcatcacaagaggtgccgattactatcggaggtaaacacatatgacaaatcagagtacaatagataaattaattgaaatgcgcctgacagctatggcagatgcattccgtaaccagctggatgatccaaaatgcagggagattccatttgaggatcaattcggtatgctggtggatatcgaatacagcagtcggaaaaataatcgtctcaaaaggctgattaagaatgctggattcgaccagccggaagcaaatatcatggatattaactacacttccggacgcaagctgaacaaggaactgattcgtagacttgcaacttgcgaatatatatctgcacaccggaatctttttattaccggtgctacaggctgtggtaaaacttacatggcctgtgcctttggcatggaggcttgtaagcagtatttcaataccaagtatgtccgccttcctgatctgcttattgacttggagattgcacggacagatggcaactacaaaaaagtaatggctaagtatgccaatcctgttgtcctgattttggatgaatggcttctattgaaaccaacggattcagaacaaagggatatcttcgaactgctccaccggagacgcaagaaatcttcgacgattttctgctcccagtatgaatttgaggaatggtatgatcagctcggcggtgatgacagtcctctggcagatgcaatcattgaccgcattgcccatgacagttatcgtatcaacatcacaagcattgatgccgaacatgacatctcaatgcgtgaggtctatggtttagacaaaacattgcgcgagtaaactcgcataagcggtttccgcaagcccggacagacggtttcccgtctgccggatttgcggtgttgccgcacaggaatattcaagaagagctgaagacacttaattatgagaattttattaagagtagacatagtattagacattttggttcagaagcagtagatgttgaacttcttagggaggcaattcagatagcgcagtatactccttcggcatgtaatagacaagggtgggtaattagaatagttgaaagcaaggatgcaatagatacaattttagaaaatcaaaatggtaatagaggatttggtcatgaaattgataaactagtcatgattacatgtgatgttcgagcttttcaaaagaatagggaactttttcaaccatatatagatggaggaatgtatgcacagagtgtattaaacgctttgtattataagggaattggagcaattccgttgagtgcatccttagccggctcacaagaaaaaaaaaataagaaaaaaagtaggaattaataaatcagaagtttttattttgtttataggtgtgggcacataccctgattcgtgtaaaacaactcgatcagagcgtatgcctgtcgatattagattagtataattatatgaatatggagatccgataatgaacaagaaaaagattatgttggtctttggtacgagaccggaagcaataaaaatgtgcccattagtaaacgagttaaagtcgagagagtctttagaaactatcgtgtgtgtaactggtcaacacagacagatgctagatcaagttttgaatacgtttaatgttgttccggattatgatctttccatcatgaaacaggggcagacactctttgatattacaataggcattttggagaaacttaaagaggttcttgaagaagtgaaaccggatgttgtacttgtgcacggagatacctccacaacatttgtaactgctttagcttgtttttatcttcagattccggttggtcatgtagaagctggtcttcgtacctataacatctattctccgtatccggaagaattcaatcgccaggttgtaggcattatttctcagtataactttgcaccgactcaaatggcagcagataacttgatgaaggaaggaaaagatccttcaaagatttttatcacaggtaatactgtaattgacgcaatgcagcacacagtaaaggaagattattctcatccagaacttgattgggttggagatggaaaacttatctttataacagcgcatagaagagaaaaccttggtgagccaatgcacaatatgtttcgtgcaatacgccgtgttcttgatgagcatccagaatgcaaggcagtttatccaatacatatgaaccctgttgtaagaaaggcagctgatgaggaacttagtggatgtgatcagattcatattattgaaccaattgaagtgtttgattgccataattttgaggcaagatgccatctatgtttaactgattcaggtggaattcaggaagaagttccttcttatggtcgtccagttcttgtaatgagagatacaacggaaagaccagagggggtgaaagctggaacgcttaggcttgtaggaacagatgaagaggtaatttatagaaatttcaaagaacttcttgaaaatcaaaaagcgtatgatgctatggctaaagcatgtaatccttatggtgatggagatgcatgtaaaagaattgctgatattcttgagggaaaagaatatcggccttggattgctgaaaattagtaagtatctggactttacataaatgttaatattaaaatggaaagtattattccatgaaaagattcacagtgacttcaactaagtttgtaaaaagcaaggttgaacatttaccaatatttaaagagtcagggaatcttgataaaaattccctgactttttctgcttaatcacgtctgaataaatcacgtgtatagactttatcttttacatcatccagacaagaatcatatcgatttgcaatgattgcctgagagatgttcttaaattcttttaaatcattcacaacacggcttccaaaaaaggtagattcctcaggaagtgttggctcatagattactactgtagcccctttggccttaattcgtttcataacaccctgtatagaagactgacggaagttatcactgtttgatttcatagtaagacggtacacaccgataacacattgtttttcctggtcaggagcaaattcaccacgattgtaataatcatagtatccagtcatatgaagtacctgatccgcaataaaatcttttcttgtcctgttagattcaacaatcgcagacatcatattctgaggcacatcctggaagttggcaaggagttgctttgtatcttttggcaggcagtatccgccatatccaaaagaaggattgttataatgagttccgatacgaggatccaggcagacaccgttgatgatctcctgtgtatttaatcctttggactctgcgtaagtatccagttcgttgaaataagaaacacgaagtgccagatacgtgttggcaaagagttttacagcttctgcttccgtaaatcccataaataaggtatcaatattttctttgattgcaccttgctgcaggagtgctgcgaagagatgtgctttttcggcagattcttcatcacaggacacaatgatgcgggacggatacaggttatcatacaaagcctttgactcacgcaaaaattcaggactgaagatgatattcttcgtattgtattttgctctgacagacgcagtatatccaacagggatcgtagatttgatgatcatcatggcatccggatttaccttcaggacaagttcgatcactgcttccacagcagagcagtcaaagaaattcttcttgctgtcataattagtcggtgctgcaatgataataaagtcagcatctttatatgcagcttctccgtcaagcgttgcagtcagatccagttccttttcagccagatatttctcgatatattcgtcctggatcggagacttcttgttgttgatcagctctactttttccggaataatgtcaactgcagttacgtgattgtgctgtgcaagcagcgtggcaatagaaagtcccacatatccggttccggctaccgcaatacgatacttcttatctagtaccatatctttaggagtttcctcttcttcgacaaacagatccgtcacttcaaatccaagattttccccaagacgctgcagctgatcaatagaaggaatataatcagaattttccagtcttccgatcattgcccggttgattcctgttgcttcagcaagctgaacctgagtaagtccttttgcttttctttcgttgataactgtgttcaccagtttatccatagataattttttcataaatacctcaaaaaccagttttaaatatcattttatgtaattatatgcaagtaaagtttgttttttacaagtagtatgatatcaaaaactggattaaatgtcaatgagagagaaaactgaagataaacatacagtgtaatgaagtcaatccataacgtatagtagttcagcggactgattaatttccagtaataattgatactcaatcagtatgaaaattgtgaaaatttaatggaaaatcaaatgttttatgttaaaatttaaatataagtggtgttcataattgtacagggtgaatgattctaacaggaggattggaaacatggagtgcgtaatcaaaagcagagaagtggatgcatttagctggaaatatcaggagtcttcagttatgacaacatcccattttatcacgttgccatttgagacaaaaacggaaaatattattttgggatttgacatgtttcattttgaatatccggataaggatcaccatgtaaaagatatggggttaaatatccggtataatgtattgaaagaaagggcggatacgattatttttcatgcagacatgtatatgcgggattcatcaggtcattttatgaagtatccaaagggagatctgaaaataaggttcaacgtgcttgcatatccacatacaacagaacttccaaaagatggagtgaagattggtgcgatagatacatttgaaatagcatatgcagatggcagagatcatcatgtgtctggttatcaggtaaattcagaaaaaggaacaagttatatttacgataattcgggcaacaatggaaagaaaacatccacccagaagacgatcgtgattccacataaggattttgaggaattaaagaaacagccggttcattttattacaggatttaatcttgctatggaaagtggggaccatcatgtgagaagtacaggatttgatgctcagaatcaggaaaacatgtttgatttgtcagatgattctggtcagcatgcttctgcaatgttgtcttatcttacatatgatatttaaaaagggagtctatacaataagtggttttatggtaaaataatcaggaggcaaaaggatattcatttagaaatgccaattaaaattatattttctatttttcatgcgtatgaagctttttgaaaagcagcagaaagaaaaaatatattttaaaataaaggagtgatgtaaattggatatctatcagattattatcacatattacccgatatggtcaccgtttgaatggattatttttttatcggttcttgctttggcggtgtgtattgccgtagttctgtataaaaaacagaagattaccatgcggcaatccatagccgggatactgttattgctttatttgcttttagtatttggttctactgtgtttacaagaatgccgggcgagcgccaataccagttggaggtgttctggtcatggaagaagatcctgcattatattgagcagcatggaatggttacaggcacagggcttttgcgggagaatctgttaaatatcgtgatgttgtttccggcaggaatgttacttccatttgtgtttggcaacagaggcaaaatcagatggtggtatggtttgctgtttggtatttttatttccggatgtatcgaagggttacagttgattctgtgccggggattatttgagtttgacgatatgatccacaatagcctgggatgtatggtggggtgtgcgatcggggcgggatgcctgaagaaattcaataaaaagtgaggcgaaacgcgtggtccgccatgtaagttttgccatttttgtttagtcttatcaaagctaagaaaagtgtattgacttcataaccgggtttgctataatcatcttatagaattcctctgcatatggaggaatagaatgggaagaacaaaacgattaaaggaactcacgatcaaagataattttatgttcggcgcagtgatgatggacgaagataattgcaaaggtcttttagaaagagtgttggagataccgatcgatcgagtggatgtcagcaaagaaaaaagcatagtgtatcatccggagtataaaggtgttcgcctggatgtgtatgcaaaagatgagaagcagacgcgttataacgtggagatgcaggtagagagaaagtcggcacttggaaagagaagccgttattatcagagtcagatggacatggagatggtgctgaccggagaagattatacggaacttccgaatacctatgttatttttatctgtgattttgatccatttggaaaagacaagtatcgatatacctttcggacaacgtgtcaggaatctgaaaatgtggatttggaagatgggcgaaccactgtgtttttaaatacccgtggaaagaacgaaagtgaagttccgggagaattggtcacatttctgcagtacatgaaagaggatcttgagggaagcgaaaaggagtttcacgacccatatgtggagcagttacagaagtttatccgcaacgttaagggaagtcgggagatggaggaacgctttatgatttttgaagagatgctgaaagaagaacgggctgccggatttgcaaaagggcatgctgaaggagttgcagaggggcgaatttctgagagtaaggatacgttactcttatttttgcagaatcttggaacggttcctaaagtactttcggatcaaattgaagaacaaggtgatttggatgtactgaaagagtggatcaggatggcattccaatcgaaatctgtggaagaatttgcaaagaagataaaataagaatctacatcggagaatatccgatctaatatcatcagccgtggctgttctggccggggctgatgataaaaaggaacaagtcaatgccgtttcgggcagatattcaaagaagagcagaggaattctatattttgtaggtaagcgcaaaatattgctacgctacccatgaattacgcttgcaccaaaatgatagatgcaagcgttttactctattttagttctgacagttcgctttcgcagtctcactccatggggcaagctgctccagctgtgcatctgacattttatcatttggtcgttgtgataagagatatgtcagatatttataggtattcagatcattcgcttttgccatctcaaccattgtatacacaatagcactagcggtggctcctttcggactggcactgaacagccagttcctccggccgacagtgaatggtctgattgcattctcgctgagattgttggataaactgcaatgaccatcttccagataagtcatcagggtgtctttccgattttgggcatagttcaccgctttcgccaaacgggttcctttgtttgggcgctgttgatctagccaattccagaatgcatccagtatcggcttctccttttcaagacggaactgttttctctgctccgcagtatgattttttgcttttgagtaccgctcataatcaaacagcttggagcaaaattgtactccttgcaccgccggaaggctgtaatcatactctttccctttcggtatggtatctgtgaagtaacgtctcacatgtgcccagcaagagcatcgtttgatatccggcagattgttataaccttgatatccatcggtctccagatatccgccgaacccctgtaggaaagatgctgcatggaactttgcccttgtttctgtgtaatgatagagcaggatcggcggaagtccatcttctccactgcggaagagccacatccaggaatctgtttcaggattacgctccggctcattcagtacctgaacccgagtctcgtctgccatcagatatttacgcttcagtaactgacggtgaaaataatcataaacatgacggagataattctcggcgcagtaaatgatccagttagcaagcgtagcccggcttaatgggacacccagttgcttccagtcctcttcctgccgctttaatggcagaccattctgatacttctggtgcatcgcccatgcaacaacggattcggaggcataactttccggaatcaatggttcctgaacaggagctttgacaaacgtctgatcatcagggtgctcctctgatctggcacactccgggcatttatacgtttcccgatagatatttaccactttccctttggctggagtaaaccggaactcatgacggacgaattcttttccaatacattccatctgtgttccgcaggttggacagttccgttcctcttctggaagagaaaggatctcatcgcaggaaggcacatttttaaagagttctgcgtgtgtccgtcgtgctttccgtttatgctctggaacagtgatatcatcaggaagttccggtttccatgccggatccgcttcctgttcggcttcatcaaaaagattcagctgaccttcgatatccttccgcttttcactggaagtgccaaaaagcttcttcgtgagatattcaatctgctgacgaagggtttctttttccagtcggtctgcttccaatgttttttgtaaagactggatcagttctgtctgtgcagcaatcgtcttattcagttgattgatcatgtccttgtattcaaggatttttgaatcttttgaattaccagccatatgttttctgctcctttttctctgctcttatcataccacaaaaagcaaagaaaaagaagccgaaacccagtgcttatcagggattgcgggcatgatccagtgcgtgtgacaatccacagttttgctgacttgcagagaatttttccaccctcattccgtaggtttgaatgctttcggttgttcgatttcaagaccagacatgagccagtcgaattgctgccaggtcagttgttttacttccaactgatttctaggccagcggaatctgccctgaacttccatgcgtttatatagcagtacaaatccatcggactcccagagcaaagctttgatcctgtcacaacgttttccgcagaaaaggtacagggcactccgccttggatccatatggagttgatcctctacaatcgcacacagtccgtcaatggattttcgcatatccgttctgcctgttacgatataaatctcatcggcggctgtgatatcgcctaacattccagctccttcataatacgaagagtctgagccaaaagctttggatctgttccatttgggatagttagaagaaaacttccaacagacagcctcattggctctgccacagaaatgttgtttctttccgtagatgccgggatcatatttaatggctgttcataggaaggcgtgtcggtgtcatgaaaatccactctgacgacttcctgactttccggagcgctatggctgcgtccggttgatgccggtaaatccatacaacctttttgacgtaatcgttttacccagttgtaaaaagttcctggtttgatgtcatgttccacacaccattgatgatctgtcaatccactttgacggcattccatgatgagacggtattgttcttctgcaggtattcttttgcttctcatgagcagtcctccataaatcgaatcgagtaaaatgctctcacctatcatttctagcaacagaagatgaagtaaagtgcttgcattctctaatgattattatggactgaattttagggcaaagcaatccgtcgaattattttgcgcttacattcggtaagcgtccctcatacataatgcttagttcaccatagacctgtgcccagttccggatcgttgctgtccattttttcgtagcttcaaaggtagccagataaagggctgtatcgcttggaaaaacacttctttgacggttcagcttccgtttgagcgtaatttgcaccaactatatcttgaacttatattttccttttccgtaaccggatacagattcaataatatctgcctgcacaagattggaaagcaattttgaagcacctgaacctttcaaatcaagaagctccataactgcacttcttccaaaaacttcatcaaaaccaaacttctcaaaaagtttatggatatgaacattcgtttttacggagaaatttctgcctctttcggaaagtacactttcaatatccactttttggacttgaatgtccacttttccattctcaatatccacttttgtatattcaatgtccactttttcttcatttaaacgtccacttatgtgaagatttcgattgtgaagctcatttttctcgttcaagagtagatttctgagaaatgcttctagatattctgttgtttcatgaatgtctttttgtagattcgtatagtttgcacgaacaagtgcatttctgaaataccacgcattttccgcaaaaatatcgttggttacagaaaaccccagtgttcttaaatatttaatgaagaaaaccgccgttgttcttgtattaccttccccaaagatatggatttgccataatcttgaaatgaatactgcaagatgatgaattatctcgtccattgaaagccctttatagctaaaagctctctcctgcgaaaaatcatattcaagtgtggtttccagttcagacgcactaccatacataacggttgctccatctagcacccattctttctttgtaatattataatctctaatctttccagcatgcttgtaaataccttgaaaaagtttgcggtggatagagatatactcatttggcgaaaatgaaaacgctgtttcagaaaggatttccgcaatgcgggaagaaaccttatctgcttcttctgtgcgctcatcatcagataaatgcacggatctttcctcatagtagctgtcgataagactctgtgcttccttcatcgtgattttgccttcaatattctgaatggcagtatcaatcagatatttagacggtttcagtccgtccactgcttgaagtccgattgcggtactccacgcataacctttatgagctttatccggctcagactctctcaaatattccttaaatgggtctttttccatttccactacctcgcttcataatcgaccatttccaactgctgatatacttttccaaacatttctccctctatatcaattatctgataaagtagttcttcgttatgcagttcatttgattttccaatagaatcactaattctgatttaaatttggcggagaaatttcttcttgttcgagacataataacaatccttctttctctaatatttacagtatatcagattcattaagaaatgtctcttgaagtgtcttaaattacgataccattatatgggttacatatattggaaatttaactaccaatttggctaattataacagaataataggagaaaatgaagggtaatgtgcgatatagatagttaccatacaaaaaggttgacctttatctaagtgttggttatactataagtaggtgataatatgaatttattggaaaatgcggttgtgcaagagcagcggcgaattgagtatatgataaagaaatatgagacagaacttactactttgccgaaaggtgctctgattgccaaaatgattaaaggaaatcaatattactatttacagtatcgcagcgggaaaaagacaatttcaaagtatgtcgggagagcaggagataaagttgaaagattgcagcaacagattgaacggcgcaggcatattcaggtcatgctgaaagccttgtctgaagaatatgctataacacagaaaatgatggaggtttgcatatgatcgtatatcatggaagcaatatggtagtagaccatccaagattagtccgtcagaatcggacattagattttggatatggtttctatacaacattcaataaagaccaggcagtaaattttgcagaaaaagtaacggcccggagggaaacaggcattccttgtgtcagtatgtatgaaacggccgagttagaagaactgaaaaacaaatataaactcctgtttttttcagaaccaaatgaagaatggttggatttcgtatttgcaaatcgcaatgggagttatgaagggataagttatgatattattttcgggccagtagctaatgatactatttaccggacgtttattgcttatgaggaaggtattttaacaaaggatgagacgattgccagactgaaggttaaaaaactgtataatcagatgacttttacgacagcaagttctttaaaagagttaaaatatatagggcagttgccgatagggagggattgcaatgagtgaaaagggaatcaaaggaatgttggaactcatcgtaccgcgcctgctccgtatgataatggaaaaacagttacttacagagaaagaagccttaacacagctatatgcgtctgacctttatcgtcagttagagcgagaggaaacgaagctctggcatttaagtattcctaccttatatgaaatgtggctggaggaaaaggagagcgggcatattacttacccagaggaggtctgagtatggatgaaaaaacgaattttattgtatattgtatagaagaatataaaaatgcaaaggggatgaatggaaaaaacgtcattgatctgtttaatcggtatcgtgtgattgagtatattcgggactattacgaagcgcttcatactactggcaggcagtatattgttgacgatattaatatgtatatcgaggcaaggcagtcatctatggggtaaggggacttcagtgaaaagcgatgaaagaatgtatccagggggaagcccctggatatttcaagttacaaattttatttttgtagtaaggtgtgacgaacctcatggtgtgggaagtcttagtaaattatttgtgatggttttggattaaaataactttatacatagaaattacttgttagtgatttcatgagctgtcatcaaactgctcacatcagttggtataatggtctcataaaattaatctggtgatatcttgagaaatttgctataatcatcttatagaattcctctgcaaatggaggaataaaatgggaagaacaaaacgattaaaggaacttacgatcaaagataattttatgttcggcgcagtgatgatggacgaagataattgcaaaggtcttttagaaagagtgttggagataccgatcgatcgagtggatgtcagtaaagaaaaaagtatcgtgtatcatccggagtataaaggtgtccgcctggatgtgtatgcaaaagatgagaagcagacgcgttataacgtggaaatgcaggtggagagaaagccggcacttggaaagagaagccgttattatcagagtcagatggacatggagatgttgctgaccggagaagattatacggaacttccggatacctatgttatttttatctgtgattttgatccatttggaaaagaaaagtatcgttatacctttcggacaacgtgtcaggaatctgaaaatgtggatttggaagatgggcgaaccactgtgtttttaaatacccgtggaaagaacgaaagtgaggttccgggagaattggtcacatttctgcagtacatgaaagaggatcttgagggaagcgaaaaggagtttcacgacccatatgtggagcagttacagaagtttatccgcaacgttaagggaagccgggagatggaggaacgctttatgatttttgaagagatgctgaaagaagaacgggctgccggatttgcaaaagggcgtgctgaaggagttgcagaggggcgaatttctgagagtaaggatacgttactcttatttttgcagaatcttggaacggttcctaaagtactttcggatcaaattgaagaacaaggtgatttggatgtactgaaagagtggctcaggatggcattccaatcgaaatccgtggaagagtttgcaaagaagataaaataagaatctacatcggagaatatccgatctaatatcatcagccgtggctgttctggccggggctgatggtaaaaaggaacaagtcaatgccgtttcgggcagatattcaaagaagagcagaggaattctatattttgtaggtaagtatatatattcagcggctggaaaagatgcaattgtagtagtcatgtgatatactgtttttatctttttcttatagaattaattgttgttgactccataaattaacataaacggaatattcaagaggattattactgtaaatttggagtgacaaagaggttggccatacctcataaccccgcataaatactgggtatgtggagttttgctcatggctaaaagttaaaataatcgaggtgatggaaatgccattgacaaggattgaagcagaaaattttacagtatttgaagatattacgataccattcagcaaggggttaaatgtattagttggagaaaatggcatgggaaaaactcatatcatgaagctggcttacgcagcatgtcaggcatcgagacatgatgtgtcgttttctcagaagacaactatgcttttccgtccagatcagtctagtattgggcgactggtaaacagaaataagaatggtaacaatacagcaaagatcttagtggaatccgatacagcgaaaataggaatgctgttttctactaagacaaaaaaatgggatgcggagattaagacagaggaaaagtgggaaaagcagatgtcggatctttccagcgtatttattccggcaaaagaaattctgtctaatgcctggaatctggatgctgcggtcaaattgggaaatgtagaatttgatgatacttatctggatattattgcagctgcaaagattgatatttccagaggcgtggattcagctgcaagaaaaaagtatctggatattttgcagaaaattagttcagggaaagtaaccttgcatgatgatagattctatctgaaaccaggcacgcaggcaaaactggaattcaatctggtagcagaggggttgaggaaaatagcattactatggcagttgattaagaatggaacgcttgaaaagggggctgtgttattctgggatgaaccagaggcaaatattaatcctaaatatattccggtattggctgaattattgattatgttggaaagtgaaggagtacagatttttgtttctacccacgactatttcctatctaaatatattgaggtaaagcgaagcaaagaaagtgatatccagtacatttctctatataaagatgaagaagaaaaggtgcagtgtgagacagcaccggaatttgaattgttggatcataatgcaattatggatacttttcgacagctttacagagaagaaattggggtggtactaaagtgaaagttataacagagtctgaaatgaattttggaaaatttgatgaaacaaatttatttcatattgaagattctaaaatttacaaagatcttggttcgggaataaaaacagttgagttcattctgaaatatgatgaaaatagtattgtgtttctggaagcgaaaaaaagctgcccaaacgctgtaaatcgttatgaatcagaagaaaaagagcagaaatttgaagaatattacttgtctataaccgagaagtttattgcatccttgcagatttatctggctacaattttggataagtttcagaatactgaggaagtgggatctaatctgaaaacagtgaataaaatgagagagatacaattaaaatttatccttgttgttaaaaatgcagaagatattacatggctggcaggaccattggcagaattaaaagcaagattgattcagattcggaaaatatggggtgtcgagattgctgtattaaatgaagaacttgcaggagaatataaattgacttgctcacgacccatatgtggagcagttacagaagtttatccgcaatgttaagggaagccgggagatggaggaacgctttatgatttttgaagagatgctgaaagaagaacgggctgccggatttgcaaaagggcgtgctgaaggagttgcagaggggcgaatttctgagagtaaggatacgttactcttatttttgcagaatcttggaacggttcctaaagtactttcggatcaaattgaagaacaaggtgatttggatgtactgaagaagtggatcgggcttgcgttcaagtcgaaatccgtggaagagtttgtaaagaagataaaataagaatctacgtcggagaatatccgatctaatatcatcagccgtggctgttctggccggggctgatgataaaaaggaacaagtcaatgccgtttcgggcagatattcaaagaagagcagaggaattctatattttgtagtttgatgattagcataaatatatggtatctgttataatgagagttagaaagtgtggaaatactgaaaggaaggaatcggttttagaagacgaaaggggatgatatgccatgggcatttatttaaatccgggagcagcagggtttaaaatgtctttaaattccgaaatatttgttgataaaagcgaactgttagatgtgacaaatcgctatgtgaatacacaacagaggtttatgtgtgtcagtcgtccgaggcgttttggaaagtcaatggcagcagatatgctggcagcctattatgattgcggggatgatacagaggaattatttgaaggactttccatcagtcagtgtaagtcttaccgaaaacatttgaatcagtatgatgtgctgaagattaatatgcaggaatttttaagcagatcagatgatgtggaagggatgcttacattaatgcaaagaagaattctgtctgatttaaagcagaaatatccggaatatgtacgggaggaggatcttgtctttgcaatgcaggatgtgtattctcatacaaaacgttcttttgtaatcttgattgatgaatgggattgtttgtttcgtgagtatcagcaggatcagaaagcccagaaaaagtatctggattttttgcgtgcgtggctgaaagatcaggataatgtagcatttgcttatatgacggggattttgccaattaagaaatatggttcccattcggcattgaatatgtttacggaatattctatgacagaaccgggggagctggctgcgtattttgggtttacagaaaatgaagtaaaaaatctttgcatggagtatggaatggattttgaagaagcaaaggcgtggtatgaggggtatggtttgattacgcacaaacaggacagagatatttgctattctatgtacagtccaaaatctgttgtggaagcaatgcttcgccacaaattcggaacttattggaatcagacagaaacttatgaggcgttaaaagtttatattcagatgaatatggatggtttgaaagatgcgatagttgggatgctggcaggagagagtattcggattaatacgggaacattcagtaatgatatgactacttttgctaccagagatgatattctgactttattggtgcatttaggatatttgacttatgatggaattttagaatcagtgagtattccaaacaaagaggtttccaaggaatatgtgaatgctattagtaccatggattggaaggaagtgattacctctgtagaggaatcccgcagacttttggagtcactttggaatatggatggtgaagcagtggcggaaggtattgatcgggcgcatcgtgaaatctctattttgcagtataatgatgagaattccctaagttgtacgattaatctggctttttattttgcaagagaatattacacgattatcagggaatgtccgtcaggaaaagggtttggagacatttgttttatccccagaaagttgcatgcagataaaccggcagtagttatagaattgaagtggaataaaagtgcgaaaggtgcgatcgatcagattaaagagaaacagtatatagatgccttgaaggattatgaaggaaatctgttgctggcaggaattaattatgacagggagacgaaaaaacatacttgtatgattgaaaagatgaatatatcataaaagaaaagagcgaggagaggaacatatgaaaagtttattgattctcggagcaggaggcttcgggcagatggtgaaggaaacagcgatccagctggggtatgaggagatcgtatttcttgacgatgcggcgtttggaaaggacgtagtcggaaagtgctgcgactatacggccaagtatggagaatacaagacggcagtagcggcatttgggaataatcatacgagattattctggacagacaaattgctggaggcaggatatgaagtgccatcaatcgtgcatccgtctgcaattgtgagtccaagtgcggttttgggatctggatgttttattatgcagcgcgcggtagtgaatacgcacacccatgtggatcgggcggcgcttgtcaacagcggagcagttgtggatcatgattcggtggtatgcgccggagcgcatgtggggcttggaagtgtggtaaaagcaaactgtacgatcgagcaggagaagaaggtagaggcaggagaagtaatcttctcgaccagaagaaagatcgaaggtgtggacagcagagcgcttgaggatgcgctgtatgcatttggattcggtccccagtgcagttatgtaaaaccgttcggggaagggcacatcaatgagacgtacgcagtatatatgccgatggaagacggcacagagaagccattatacgtactgcagagaatcaatatcaatgtgttcaaagagcctggtaaggtaatggagaatattttcggagtgacagagtttctacgggatgtgatccgtcgggaaggcggagatccggatcgtgagacactggcctacatcaagacgaagagcggggagacatattttgaggatgatgaaggtcagccatggcgctgtgcgaattttatcgccaattctgtgtgctatcagatggtggagcgtccggagcagttttaccagtcagccagaagctttggtcactttttgaagcagcttggggaatatccggcagaaagtctgtatgagaccattccgaatttccatcacacggtgaaacgatttgaagcattcgcacagtctgtacagagagacgtgaagaaccgcgcccgtctgtgccgtccggagattgagtttgcgctggcaagggaaaaagactgcggagctctgatgagcaggatggaagcaggtgttcttccgctgcgtgtgacacacaatgatacaaaactgaataatattttatttgacgcagagtccggaaagggattgtgtattattgatctggatacgatcatgccgggactggcagccaatgattttggagattcgattcgttttggcgcatctacggcggaagaagatgaacgtgatctggacaaggtccattttgatatcaatctgtatgagctgtatgtgaaagggtatctggagatggcaagagatgttctgacaccggaggagctggagagtcttccgtggggtgcaagattgatgacattcgaatgcggaatccggttcctgatggattttctgcagggagatacgtatttcaagacggcatatccggagcacaacctggttcgtgcccgtacacagttcagactggtacaggagatggaagatcagtttgatgaaatgtgtcggattgtgagagagtgctaggaggatggatcgtcttcttcccgtttggatacaattaccaatcggcagtatagtataatttctgtgataattatggaaataaaggcaatgccgcctatgatcaatcgttctattctgaacgccccctttgttcattatataataacaacttattgaggaatatacaggtacagtacagtatattccttgatttgttttttattctttattacagaaaaaaggtgtttttactgtagtccgcagaaaatccggttttttaaaattgacaaaaaaaattagaagtgataatcttaaatggaaactgtaaatttttatagcagagagggaatttggatgagtggatatattgatatgcactgtcatattttgccggaagtggatgatggagcacagagtatagaagagactgtgcagatgcttcggattgcataccgggaaggcattcgctgcattattgcgacacctcatcaccacccgaaacggggaatggagcatcctgaaagacttagaaaaaaactgaccatagtaagaagagaagcaaaaaagatagatgaaaaatttcgtgtatatttaggaagcgaaattttttttgggcaggatgttgcagaaaaattgaaatcaggtcgtgcgctgtcgatgaataagaggcaatgtgtgcttctggagttttctcctactgacagtttttcttatattcagcaggggatacaaagtgtacagatggccggatatgaggtaatactggcgcatgcagagcgttatccatgtttgttcaaggatttggaccagatcaggtatttgtgggagatgggaacgcggattcaggtgaatgcaggaagtatcaccggtgacagcggaagatcggcaaagaagttcgtaaagcagcttttgggagagcatatggtacattgtgtgggaacagatgcccatggtgtggaccacaggcagcctaagatgaaaaaagcagcggaatatgtagaacgaaaatatggagaagaatacatgaggaggatatttttcagcaatgccaaagagttgttgagaaaaagaagagaaaatgaatcagaataacacgaacatgggaatggaaaatgatgaaataacaattgatctgatggacttatttcaggttgtgttcaaaaaactgcatctggtgcttcttgccggaattatcgcagctttagtggcggttttagtgacaaaattgtttatgacaccggtttatacatctacgacaaagatgtatgtattatcaaaacaggatgccaattcagcggttacatccagcgatctgcaggctggttctcagttgacgaaagactatatggagctgatcaaaagtcgttctgttatggagcaggtgatcagtcagctgcagttggatatgagcgtagacaagctgagcggggagattacggtatccaatacagcagatacccgtatcctgagtatttccgtggaaaatgagagcccaaaactggcaaaggaaatagcagatgcagtgcgtgagtctgcaagcgttcagattacgcagattacggatgcagatgcggtcaatatggttgaggaaggaaacctgccaaaggatcccacttctccaaatacgatgaaaaatgccatgttaggcggaattcttggaatatttcttgcactgggagcgattgtactgatctatatcttagatgatacgatcaagacaccggatgatgtagaacgatatctgggactgacagttctgacatcaattccgatcgcgtcaggaacacctgccgcaaagaaggtcaggggattgtcagcacggaaatatacaaaaaggaatgaaaagaagtaagcgggaaggaaaaagaagatgcgggaaatagtattaaatggtctggaaaaagattttcgaagtaatgaagcgtataaaaatctcagaacaaacattgaattttcaggcgaggagaacaaggtattagtatttaccagttgtacaccgaatgagggaaagagtacggtttctctttcagttgcgtcatcgctggctgaaagcggaaaaaaagttctctttattgatgcggatttgcgtaaatctgttttggcagggtgtcacagagtacagggcgagttaaaaggattgagccactttttgtccggaagggcaaaggtggaggatgtagtatgtaagacccaaatagaaggtctgatggttatttttgcaggaattgtaccgccgaacccggcagagctgttagggcaggagcgatttggaaatttaatctccagcggaagaaaggtgtatgactatattatcatcgatgccccaccgcttggaagtgtcattgattcagcgatcatagcgagagtgtgtgatgcttccgttctggttatctcagccaatgcgatcagtcataaatttgccagagtagtaaaggaacagctggagcgttctgagtgtccgattttgggcgtggtactgaataaagtggatatgagccagaacaaatattatggcaagtattatggaaaatattacggtaaatatggagaaaaatagaaaaggaaagcggtcatgaaacgaggatttgtgggggctatattggcgggcgtatgtgtggtattgggagttgccgtagcatacgtaagttcaaagcaggatagaacggatcctgttattacggtaagtgaggatgcacttacgtacacagaaggagaagggacagaaggattgctgacaggagtgacagcaacggacaaagaagatggggatcttacaaaggatatctttgtggaaaaagtggttccgatcagtgagaacaaagcaattgtatattatggggtattggataaaagtcagaatgtaggaacagctacaaaagaggtagagtattttccggcaggacaacagcctgcggaacagactccgcaggaaacggcaccggcagcggaagcagctgcacagccgctggctccaaacggggagcgccctgtgatacagctgaccacaggtactgcggatattccggcaggaggaccgtttgatccgctttcatatgtacagggagttgttgatgatgtggatacagcagatgtgttatctgcatctattgcggtggaaggtgcatatgatatttccaagccgggaagttaccagctgacgtattttgtgacggacagcgcaggaaaccagtcagatccgcaggttttgactttgacagtacactagaaggagtgttacaggatggaaaacaaacgaacagaagcaaaaagtagttaccatgtaggcggaatgagtattgtattcgttcaactggtattgtctgtcttatttttggtgctggcaaaagagaacggaatgattccgggaaaatatctggtgccgatcggggcaggtcttttggtgttttttggaattgcgtttggtttacagtttttgaggggaaagaaatatatagttggacttgtgatcagtatcctggtggatctgattctggtcagtggtattttttcgatttataaagcagacaagctgttggttcaagtagggggagctacgtataagacagacagtatggttgttgttgtccgggcagatgactcggccaagacattggaagatgcaaaagattatcgctatggaatccagacaagtgttgatgttgagaatacagacaagatgctggaagatgtagagaaaaatgtgggaagaaccgtgaaagtggaagaatattctacaattcaggaagaggcagaggcacttctctggggacggatcgacgcagcgatttataatgaggcactggcaagtgtgattgaagagagtattgaagattattcatctcaggtgaaagtgttataccagtatggtattaagacagagattgttcaggaagaagaaaaaaatgtggaagagccgtttaatgtgtatatcagcggaattgacgtttcaggtgcaatttcaacgacaagccgcagtgatgtgaatattattatgacagtgaatccgaatacacataagatcctgcttacatccactccacgagattattatgttacgataccggggatttccggagagcagagagataagctgactcatgcaggaatttacggggtagataaatcgatggagacgctggagaatctgtatggaattgacctttcttattatgcaagagtaaactttacatcactgatgacgatcgtagatgcactcggaggtgtggatgtgaattcagagtatgagtttacggctggaggatatcaatttaataagggtgtcaaccatctggatggaaaagcagcgctggcattttcaagagagcggtacagttttcaggatggggataaccagcgaggaagaaatcaggaggctgttctgacagctattttgaataaagccatgagtccggcgattctgttaaatgcctcatccattatatcaagtgtgtctgacagtgttgagaccaatatgacaagtgatgatatagcaaaattcatcaatatgcagctttcagaaggtacaagctggcagattgaatcgacagcagctgtgggaacaggagatacgcaggcatgcttttcttccggatctcagccgttatatgtgatgtggccggatgaagcgactgttgcgacgatttcacagaagatgcagcagattttgggtggtcagtaacaatatccgacatctttcgtacaatatgccgaagaaatttcgtattagccgaatttcttcggcattctgtcgtttttcactttctttttaaaagtagataaagtataatgaagctatacgaaaaaacagcagctgtgaggtgggattatgggaagacagaaaaccgtacaaaagaaattacagccatatgaaatcggagaattagatcagtatcttttcggacagggcacgcactatgagatcttccgcaagatgggggcacacaaggccgtgcagaagaagcaggaaggtgtttattttgcagtatgggcgccgcatgcagcgagagtgtccgttgtaggtgaatttaacgcatgggattttggggcgaatgagatgcatcgtcaggagccgcttgggatctacacttgttttgtgccgggagcgcaggaaggggatctgtataaattctgtatcgagacacagacaggagaacggatttttaaggcggatccgtttgcaaattatgcggagcggcgtccgggtacggcttcccgagtgaccgatatttcgaatttcaaatggtcggacgagcagtggctgcagaagcggaaaaagtgggatcaaaaggagaatcctctggcgatctatgaggtacatatgggttcctggatgcgtcatccgggcacagaggatgagggattttatacctatcgtgaatttgctcattcgattacggattatgtgaagaagatggggtatacccatgtggagctgatggggattgcagagcatccgtttgacggatcctggggctatcaggtcaccggatattatgcaccgacttcccgttatgggacaccgcaggattttgcctatatgatcaattatctgcacaggaatggcatcggcgtgatcctggactgggtaccggcgcattttccaaaggatgcccatgggctggcggactttgacgggacaccgacatttgaatatgcggatccgaaaaagggcgagcacccggactggggtacgaagattttcgactacagcaagccggaggtgcagaatttcctgatcgccaatgcattgttctggattgagcattatcatgtggacgggcttcgtgtggatgcggtggcatcgatgctgtatctggattatggaaaacaggatggacagtgggtgccgaaccagtatggaggcaaccagaatctggaagcgattgcgtttttcaagcatttgaacagtgtggtacttggaagaaacgagggtgccatgatgatcgcggaagagtctacggcatggccgaaagtgacaggggcgccggaagaggacggacttggtttcagcctgaagtggaatatgggatggatgcatgactttacagagtatatgaagctggatccgttgttccggaaaggggcacattatcagatgaccttttccatggagtatgcgtacagtgagaattatatcctggttctgtcccacgatgaggtagtgcatctgaagtgctcgatgctcaataagatgccgggacttggctttgacaagtttgccaatctgaaagcggcgtacgcatttatgacgggacatccgggcaaaaagctgctgtttatgggacaggagtttgcgcagcttcgggagtggagcgaggagcgggagcttgactggtatctgctggcagaagagccgcatcagcagatccagaactggtatcgtgatctgcttcatctgtacagacacaacaaggcgctgtatgaactggatacggatccggcagggtttgaatggatcaacaaggatgataccttccgcagtattttcagttttgtgagacactccagggataataagaagaatctgttgtttgtctgcaactttacgccgatggaacgtctggattaccgggtgggcgtgccgcgcagaaagcagctaaagctggtgttggacagtgacgatcccaaatatggtggaaacggtgtggagcgtccgaaggtatataagccggtgaagcaggaatgcgatggtcagaaatattcgatcgcatatccgctgcagccatatggagtggcggtatttgagttttaaaaatgttggaattgtaagagtttttggaaacagtgaatttataaagtaattgaatagtatggatacttatggcacctgtcagaaatggcaggtgtcaatttttatttttacgctggcaagataaaaagcatctttcaattattaaaaatgcacaaaaacaagggcttaaatccatgaaaaacaactttaaaattgttgaaaaattacaaaaaacaaggaaatatactaaaaaatcaatagttaagaagcttgaaaaagtgataaatctataaaaaatagacaaaaacagggctgcaaaatacgatgaaaaacagaccgttcacgtaagaaatcgttactgttcgcgaaaaaatggtatgattcagccatggaaaaggaaaggacgtaagaagaaatgagaaagattgcatttaatgacggctggacatgcagacacgccggagattcgggaaagggaaaaccggttacgatccctcatgatgcaatgctggatgaaaagcggacgcaggagagcctgggaggcattaacatcggctggtttgaaggatttgactatgtgtatgagaaagaattttctgtaccgcaggaatatgaggatttcagacttgtctttgaatttgagggagtctaccgcaatgcagaagtgtatctcaacgggaaaagagcaggatttcgtccgtatggatatacaaatttttacgtagaggcaaatgagtttcttcattttggaatgaaaaatcagatacaggtcattgcccgcaatgcagatcagccaaacagcagatggtattcgggagcaggaatataccggcctgtatcgttatatatgctgccaaagaagcatatcggcatcaatggggtaaagatttccacagtcagtatccatccggcagtgatcgatgtaaaggttgagacatctgcatcgggagaactggaactggaaattttcgaaggggagtctttggtatccggtcaggagccggtcgcaagcgtgaagaagtctgcggatggaaattttcagatgcagctggaaattccggatgcgaaattgtggagtactgagtttccgtttttatacacatgcagggtgcggtttgaagaagatgaagcagaggaaatattcggaatccgtacgattgagtggagcgcagagaacggatttttgatgaacggtgaacgggtgatcctgaggggtgcgtgtatccaccatgacaacggtgtgctgggagcctgctgttatccggaggcagaggaacggaagattcgaattttaaaggaaaatggatacaatgccatccgctctgcccacaatccttgttccaaagcacttctggatgcctgtgacaggcgggggatgctggtcatggatgaattcgtggatgtgtggtatatacacaagacggagtatgattatgtaaatcactttgcaaaatggtggaagcaggatttaaaagatatggtcgaaaaggattacaatcatccttcggtgatcttatattctacaggaaatgaggtttctgagacggcccaggagagaggaatccgtctcacgggacagatgacagaatatctgcacagtctggatgcaacaagaccggtaacctgcgggatcaatatcttttttaacttcttaagttccattggcttcggcgtttacagtgacaagaaggcgaagaaagaagcaagccgatcgggcgggaagaaaaaggcagtaggaagtgaatttttcaataatctggcagggattcttggaagtaagacgatgaagatcggagcaacgcttcacggctgtgatgtaaaaacaagagatgcttttgccaatatggatattgcaggatacaactatggtatctaccgctatggaaaagatctgaaaaaatatccgaagcgtttgatcctgggaagcgagacattttgttctgacgcgtatgctttctgggagatggcgaaaatacatccgaggatcatcggagattttgtgtgggcaggaatggactatatgggagaagtcggtgtcggtgcgtgggaatacagtgattatgcgccggatttctcacatggagcaggatggatcactgcaggaagtggaaggatcgatctgaccggaaaaccactggccgaggctgcctatacgaagacggcatttgaactgatggaaaagccggtgatcgcggtttgcccggttaatcacaccggggagaagcactcgccatcagcatggaagatgagcaatgccattgagtcctggtcctgggatggatgttccgggaaaaaggcacaggtggaagtgtatgcaagagcagacagggtcgagctgtttatcaatggaaagtcggttggaagtaagaagatgaaaaatgactgcagaacttcctttgatgtgatctatgaggaaggaatcattgaagcgatttcttatgatgcacagaaccgggagattgcgagaaatgtgctctatacagcggggaaggaaacgattttaaccggaatcccggaagaaaaagagacggaagccggaaagctgtgttttgtgagactgcagtatacagataaaaccgggacagtcaaaccattgaagcggggaacattggaagtaaccgtagaaaacggagaacttttaggtcttggaaacggatgtccgtacaatgagcggggatatcggactgcgaaaacggatacgtattacggagaggctctggcagtggttcgggccggaaagactggcacggttgatctgaaggtgtcagacgggaagtatgcctgtacgttacagattccggtaagaaataaagaagaggtggaagaatgctgaaaataagcagactgacagtagaaaatatggaaacaggatgtgtgacggataatccgcagccgagagtttcctattgtctggaaagtgacagacaaaatgtaacattgaaaaaagcagtgatttcgataggagactggaagaaagaaacagactgccagatcgcagtgccgtatgagggtagcagattacagccgtttacaaaatatgcggtgcgggtggaagcagaggatgacgcgggagagcgtgcctgggccagcacggaatttgagacgggacgtatggatacaatctggtccggacggtggattacggacggagagtatcggtttaaggaggcgaagatttctccgaagacgatgacatttcgaaccaggttttcctgtgaaaaagaaattgccagtgcgagactgtacgtaacggcgctgggaatttatgagctgttgttaaatggagagaaagtcggacaggattattttgcaccgggatttacgtcctaccggaatcagctgcagtatcagacttatgatgtgacagatatgctgaatgatcgaaacgagctgcttgctgtggtcggcggtggctgggcagttggctctttcacctataaaagacggaacagagtgtatgcaaagcgacaggcgctgcttggagagctgcggattttgtataccgatggaacgggagagacaatcgggacaaatgaagagtgggaagtaacggaagaaggaaattataaagagacagagttttacaacggggaagtgtatgatgccaccgtggatctggagaaaatttcctggaaaaaagcaagcttcgaacaggtaaagattcatccaaagatcatggcacagtatggagcgccggtacgtgcacacgaagagtttcgtccggtacagattacaagagcaaagagcggtatgctgatttatgatttcggacagaattttgcaggggtgatacacgcggcaattcgtggcagacagggacaaaaagtggagtttcgtcacgcggagattctgatggacggagagttgtatacagaaccattaagaactgcaaagcaagaagcggtttatatttgtaaagatggagagcagacctattctccgaaaatgacatatatgggcttccgctatgtgggtgtgcgtggaattgaagaggatcaactggaactgaccgcgttggcactctattcggatgtggaagacaacggaaacttttcctgctccaatgaactgatcaaccagctgcagaacagtattcgctggggagcaaagtccaattttgtggatatcccgacagactgtccgcagagagatgagagaatgggatggacgggagatattgcactgtttgcgcctacggcagcttacaattttaatatcagccgttttctggagaaatggctgttggacgtgaaggcagagcagaataaaggcggcgggattccggttacggtgccgcttgtccgggtaccgctgcagtgggagatcatgatcccgatggcggtggatcactggggcgatgtctgtatcctggcgccgtgggcggaatatctggttcgcggagacagagggcttttagagcggatgtatccggtgatgaaaaaatatctgaaggcatgcaaattctgggcagagctgttttctgcgggaaaacaccgcaggatctggaagcttctgcatcattatggagactggtgtgcaccgggtgtcggcatgtgggagtggatgggaagaggaaaatggaccgccaccgcatgtatggcaaattccagccggattctggcaaagatcgcggatattctggggcaggaagaggatgcaaagtattaccggaaactcagtcaggagaccggggaggcataccgggaaattttgatgaaagcagactgcacggtaaagaaagagtttcagacagcatatgtgctgcctctgtattatcagatgctctccggagaggataaaaagaagactgcggcaaatctggcgcgtctggtgaaaaaggacgggtatcacattacgaccggatttccgggaacgccgtacgttctgtttgcgctggcagacaatgggtatgaggaagaggcatttaaaatgctccttacggatacctgtccatcctggctctatgagatgaaagtcggaggaacgaccatctgggaacgatgggatgcacttcgggaggacggcacctgcaacacgggaaaagatgacgggaccggaggtatggtttccttcaatcactatgcaagtggtgcagtgggagactttttgtaccgcaggattgccggaatcgaggccacagagggcggataccgctctttccggatccagccgctgacgggaggaaatctgaaatgggcaaagggaagtgtcaacacagcctatggaacagtttccagtgagtggaagattgaagatggaatgtttacgatccaggtgcaggttccggtcggaacaacatgtacactggtgatgccgggaaatacacagaaggtattgggaagtggtacttatacgttaaaagaagcaatcagggaaaggaatgaccgaaatggaaaagaatcagttttttgacaacccgctgatgcggacaaaaatcacttcggcaaatgtaaagccgaaagaaatgatactggggtattttctcggtccgttttgcgcatttatttcaaatgcaatcttcggggcgtatttaaaccgctactattcggatgtgcttggatggacggatacggcaaaatttgggattttttcagcggttcttccgatggtttctgtcatttttgtgattcttggaaatcttctggtagggcgtctgattgataataccagaacatctcaggggaaggcgagaccgtatatgctgctgtcggcgccccttgtgacaattgcgatcgcgctgttgtttttaacacctcaaaatgggagtccatcgactcagatgatctggatcgcgctgtcctataacttttactatgcagtagcgtatccgtttttctacacagcgcacagctctatggtggccctgtctacgagaaactccgatcaccggggaatgttggcaacattttccaatgcatccggtgtggctgctgtaggaatcggggcaagtattttagtgccgatgctgctgcagagttttctctttgtggaaaaagacggcgctattgataccgcacagagttatcagaactggcggctcgtgatgatcgtattatgtgttgtgacatttctggcgatcttgctggaatattatttcacacgggagcgagtgacagaagaaaatatgaagctggcgatcaaagaagaaaagcttccgatgatgaaacagctcaaagcctgtgtgtcaaacggttactggtggatcattatcttatattttctgctgttccagtttggaggtctggtaaagaacggttccatgagttattactcccgctggatgtttgacggaatcacaagtgaagcggctgcgggaacggcaatgggaacattggggctgatcggaggacttccgacagcaatcggaatggttctggcgtggccgatcgcaaataaactgggaaaacaaaaagcagtgactattggtctggcaatttcggttgtgggaggtctggtcagctttctggatattcacaattttaccattgtatgtattggtgtgatcttaaaaggaatcggttcgattcctgcaatgtatgtgacactggctcttttgtctgatgtactggaccatctggaggcaaaaaatggatttcgaagtgatggatttacgatgtctgtgtacggagcgatcatggtgggaatgacaggactggggaatggtctgatcaatgcattgcttacagccaccggatatgatgcctctgcgtcagttcagaacggaggcgtacagtccatgctggcgttgtgttatctgggggcagagatcatctgttatgcggtgatcgtaatcctgatgtgcttcttaaaagtagaaaagcatattgaggaagatcagaagacgattctgcagcatcagaaaaaagcggtgttagaagccggaggagtgtggatcgaaccagcagagagacttcgcatggaacaggaagaggcggagcgcatggcagaagaggcgagaatcgaagaactcaaagcatattgtaagaaaaaaggcctggattttgaaatgcaggaagcaagctatcagaagaaactggcagagaagagagcaaaagcagaagcgaaggctcgaaaaaaacaaaaaagccagttcttataaagagtcaaagaggaggaacgttatgagcgagaaacgggaaaaacaaacaaaatcaaaacgccgcatctggcgtggtgtgactacggcaacagcatctttactgacgctgtctatgtcagcgactctggtgatagacgggtttcgtacggacattgacaagtttctgggcactcagagtacaaaaatggtgactgaagatgtaagtgcagaggattacacatttcagtcggattacagctcaacaacagagcttctggattccattgaagatctgggagaacgcatgaatgaagagggctctgttttgttgaaaaatgagaatgcagcgttgccgctttccaaggaggaaacgcagaaaatctctttacttggattcagcagttattatccggtacaagggggcgattttggaagtactctcagtgaaaataagggaacggatgcagatacggtagatatgctggaagcgtttgaatccaagggatttgagatgaatccgacattaaaaaagatgtatcaggggttaaaggaagaatttaaatcagaggcagttcttccatggggtgtgacaacctattatcgtgcaacagcaccggctacaactggagtatttaccagtttggaacctgagacagcaacgctggatgaggcagaaccaaattggaaaaagagtatgacggattacaatgtcatgattgtgacacttgcccgtgcagcaggagaaaatgccaactatacaccgggagaagatggggtgaatccagaacaggatctgaatcaggcggatccgctgggactctctgacacagagcgtgcaatcatcgatgaagcagtcaatgcaaaaaaggaaaacaatggaaaattgatcgtgatgctgaataatgcgagtgccatggaaattgaagagatcaaaaacaatacaggcgtagatgcgattttggaagtcggacttccgggaggttatggcttctatggtgtagcagatgtactcagtggagaggtgaatccgtccggacatcttgcggatacttatgcagtggataactcaagctctcctgcagcgcagaattatgggaactatgagtggacaaatgcggattctgcatattccatcaattccgagattgtagaagcagaagggatctatacaggatataaatattacgagacaagatatgcggatacagtattgggacagggaaatgcttctgacaagaccggaagttccaatggaaaagcatggaactatgaagatgaagtttcgtatccatttggatacggactgtcttatacaacattttctcagactctggacagtctggatgtgaatctggaagataagacagtgacagccaaagtaactgtaaaaaatactggagatgtggcaggaaaagatgtggtacagttgtatacgtctcttccgtatacggaatatgataaagaacatgcggtagaaaaagcagcggtacagcttctggattatgaaaaaacaggtgtgctgcagccgggagaatctgttactgtcgagattacggcagatgctcaggatatggcaagctgggacagcacatgtgacaatgcggcgggaacaaaaggaaactggatcctggatgcaggagactattattttacagtcggaaatggttctcatgaggcagtcaacaacgtgctggcagcacagggtatgacaaaggcaaacggaatgactgatacaggaaatgcagcgaatgtgaagaaatggatactggatacattagattctgagacttttgcatattcaaacaatggaacagcggtagaaaatcagctgcaggatatggatctgaactactatatgccggatacagtaacgtacttatcaagaagtgactggaaagcaacctggccaaaaacatataaagatctgacagcaacagatgaaatgatcgaagtgatgaaaaatgacctggtagagatcaaggaacagggaaatccggatgaagttacatttggcgaggacaatgggctgacacttgcaagcctgaaaggtgagacggacttgacaaatgaaaaatggacagatttgattgatcagatcacactggaagaagcgatgatccgtactggatttggtggaaccagtacaaaatcaattgtatcgatcgtgtctccggaggcagtacagaatgacggaccgaacggatttaattcttatacattgggacagtacgcaaatacagatacagattccgcagatccgtatgtcatcgatccggatgacaagaatttgaattacaaattcggaaccatgagtaatgaaacagtgatcgcgcagacatttagtaaagagatggctgcagagtacggagctgtgatcggaaattattccatctggtcgaatcttccgatcctctggggtgcaggaacgaacctccaccgtacaccttacaatgcaagaaaccatgagtattattcggaagatgccattctgacagcgtatcaggcagcatcatatattgcggcaggaaaagaatacggatgtattatggcaccaaaacattttgcattcaatgatacggagatcaaccgttccggtatcgcaacttttatgacagaacagaaagcgcgtgagaacgaactgcgtggaacacaggcaagtgtggaagatgcacagacacttgggatgatgacaacatttaacagaatcggatgtactgcagggaatgcacattatggtctgctgatgaatattctccgcaaagaatggggattccaggggctgatgtcagaagactttatccaggatgcaaactacagtgtgttaaaagaagcggtacaccgtggtgtaacgatgacttgcaatactggtgacagtaatatggaagctgtaacagtaaaatggaattactggaccacagaggcggtcagcaaagatgcgtctatgatgcaggatctgaaaaatgttatgctgtggcagaattatgcacttgcaaattccaatgcaatggatggattgaatgagacctcacagatcaaggatgtacgcacatggtacgacaatgcattgacagcggcatctgcagtactggctctgtttacactggcagcggctgcgatgtatgtgagagatatcaagagacgtaaaaacagttaagggagggtacgttatgaattttataaaaaaacaggctgcaggcttttatctgacgttgcttgcgctgatcctcggaacagcaggagtcgtattttatgtgatcaactgtaacacctcgtatttttccaatcttggaatcagctggggagttgtaggctgtcttgtggcaggagtagttctagaactgctctttgtggcaggacaggaaaaatcaccggaaatgccggcattggacatacttccgattctggcaggggtgcttttgatggcagggtttgtattctttgtccgtctgagagtcaacagtattgcgactattttatcgtttgaaagaaatgcgcagactatggcagatctgtccagtgcgatcattggaatgggatgtgctctggcagcagttattatgacaatcatctcttcatttttcagaacagtaagagaagaaaaatagagaagagtgaagggtgtcttatcacaggcacccttattttgacgtttgaaaacaggcttggtatactaagagaaacaacggattttaaaagaaacagttgggagggtacaaaacgatgattcgaattgcactggtagaagatgatccggcatatgtagagcagctgacttcttatttgagagaatacgaaaaggaaagtaaggaacggatcagtgtgcagagattttcagacggcgaggatattgtgaccgggtatcgggcggactatgatattattcttatggatgtggagatgaggttcatggatggaatgtcggctgcagaagcaatccggaagatggatacggaagttgtgattatttttattaccaatatgccgcagtatgccatacagggatatcgggtggatgccctggactatgtgctaaagccggtttcttattttgcgtttacacagcggatcgaccgtgcactgacgagactgaaaaaacggaaaaagaaatatctgacgatcgcggtgaagggcggtatgatgaagttggatctttcggagatttgctatgtggaagtgcaggatcatgatctgatctatcacacagtcgggcaggattacagaacaaaaggcacgatgcgggatgcagaggaaagtctggcggatggtatgaaagaggagcggtttttccggtgtaaccggtgttatctggtgaatctggattttgtggaaaattttcaggggagtgacatcaccgtgaatggagactgtattcaggtaagccgcgcaagaaagaaggcatttttaaatgcgctcaatgattttatgaatgaggtgggaaaatagatgagtgtgcaggaaatgatcaatactccgggatattattattcgctggcatactggctggcagcgttcattgtgacctgcacgaatgagaagagaatccagggtataaaacgatatgtgacacatttgatatttctggcagcaatcgtggggtttatggagattacagatggtgtgaggaccagtttgtttcttccgtgtatgttggtgtcggtttctctgtttttgatctatatttaccgatgctgtcagttttcacttgccgaggctggctattattgcgcgcgagcgtttatcagtggagaatttgccgcatctttcggctggcagatttattattatgcagtgaagacatttcagatcaatcatgtgaaaagtgtccagtgggtgctccttgtgatcgtgtatgcagtgatatttggaattttatatctgctggaaaagtatttgcaaaagggcggcaaagagatgcatatcaaccgaagggagtttttcacggttctgattattacggcggcagtatttgcggtcagtaatctgagttatattgataaggatactccgttcagcagtcagtttgcggcagagatgtttatcatccgaacgcttgtggatctaagcggaatggcagttctatatgcgtaccatattcaggtgcgggaactgcagatgaaatttgaggtggatacgctgcagaatattttgcagatgcaatataagaactatcagctttctcaggagagcatagagattgttaatcagaagtatcatgacctgaagcatcagatcgcacttttaaaatccgaggctggcagtcagaaatcggtagagtatctggaaaagatggaaaaggaaattaagatttatgaggcgcagaacaagactggtaataaggtgctggatgcggttcttacgagcaaaagcctgtattgtcagaataatgggattgggctgacatgtgtggcggatggaagtgtattaaattttatggaagatatggacatcagtgcgttatttggcaatattttggataatgcgatcgaaagtgtggaaaagttgagggaacaggaaaaaagactgatccatctgtcggttgcaaagcagaaaaattttctcaggatccggtgtgaaaattattgtgaggagtcgttacagtttgaaaatggaattccggtcactacaaagaaagaccggcgctttcatgggtttggcatgaagagtatcaaaagcactgcggcaaaatacggaggttctgtgacaacggatttgaaaaagaactggtttgaactgcggatcctgattccactttcctgaaaaaatgtttgcggagcgggcgaaacagagctacaatatgaagtaaacaggacaggcatttggggaagataaaaaatgccggacaggagagcatatgagtatcgaaaaaacaatatttggaaccacaaaagacggaagagaagtaactgcctatacgctgcgcaacattcggggaatgcgtgtaaagctcagcagtctcggagcggcgatcgtatccgtggagatgaaagattttgcgggagagcgcaaggatattgtgcttggatatgacaaagtatcggattatgaagagaacggaactttcttcggggcagcagtcggacggggggcaaaccggacagaaggcgccggatttgtgctggatgggacagagtatcaccttccgaaaaatgagggagagaataacctgcacagtggaccggacagttatgcgttccgcctctgggattgtgtgaaagaggaggaagacagtgtttctttccacctggacagcccggatggagaccagggatatccggggaacttctcgattaccgtgacctataccctgacagatcaaaatgagttgaagatccactatgaaggagaatctgatcagacaacgatcgtgaatatgacgaaccacacttactttaacctgaatggacataactgcggcagcgtaagacgtcactggataagactgcaggcatcttcgtttacaccggtaaaagagaccggttcgattccgacaggagagatttggccggtggaaggtacaccgatggatttcacaaaaggaaaagtgatcggagaagagctggcatccgactatcatcagatgcgtctggtcaagggatatgatcacaactttgtcatcgatggatgggatcagacactgcgcaagattgcagaggtggaaggagagcagtccggaattaccatgaaagtatatacggatcttccgggtgtgcagttctataccggaaacttcctggagggagtcagaggaaaacgcaacatgatctaccacgataactccggcttctgtctggagacacagtattatccgaatgcggcgaatgaggaaagcttcccgtcaccggtactgaaaaaaggagaaaaatacgacaccacgacaatatatcagtttggagtgagataatcacataaaagttcccggcagaaattttctgcatatttctctggacagcgaaaaacttgcagatttaattttacaaccgaatggaattcagattattttttgataaaagaaaaaataaggcaggatgacaaggaataaatccttaagcatcctgctttactttatacggtatcattcctcttgatatatcccggattgtctacatttgcaataatttctttggcgtgtaagagctttgcacgcttgtctaccacctgattttccacatgaacgtcttctcctacataagcgcccggaaggagaacggtattccttacaacagcaccttttttaatcatgcatccacgtccgatcacagagttttccacagtgccttcgatcaggcatccgttggatacgaaagaggtttttacatttgcagtctcaaaatattgagtcggacaggaatctgtcgtttttgtatagatcggccagttatcatcaaacagactgaaggcggatttaaaatcgagcagggaaagattcgcttcgtaatagcttttcaaatctgtaatggcggcaaagaagccacggtgggaaactccgcggatatccagttcgctgcattctatattgatgacttggggcagtgtgtacatagaggacatatcatgcccttttttgatcaggtcgataaacagttcttttttcattacataagtatccatgaagatatttctgttttttgcatttcctctgtttttttcaatcgagagaacacctttctggcggttcagattcagaagatcacagtttaagaagtgatcctttgcattgtcaacagaatgatacagcagcgtaatatccgcttcggagtcgatatggctctgtaacagtgaatcaaagttcatggagtataccatgtaactcggggcaatgatcacgtacgggcaaggtgtattttcaatacactctatgttttctatgtaagctgcaatttcgttgtcataaatgctgttttcaattccgttttcagaaaagaggattcggacttttccacgtttggagttgatattgtaatgtcttccggttccgatatgttcggtaagagaacggggcttttgattaatatacacctgaatctggtcaatgccgctgttgctcatattggaaagcggaaaatcgatgacacggtatcttccgaggaaggacatggcaccgatcggacggtaagactgcagtccttttacccagatgtggtttccggaaaagttgatgattcctaatgccttgctcatattattctgctcctttcacacgttttgcaacaagttcgatatgttcgctgtccggactgcctactacggcatttttcccgatccgcactccgtcagcgaccagggcgcgctgtacgacagctcctgcttcgacaatcactcccggcatgagtacactgtcaatgactctggcgccggtatcgatcttggcactggtaaataacacggagtttttgacttcaccgtcgatcatgcagccctgggtaatgaaagagcgtttaatatcggcgtttggtccgatataatgaggaggtgttgtcggatcttccgtatagatcttccatgcgggatcgttgagatccaaagcattatttttgtccagaagatccatatttgcttcccagagagagtcgattgttccaacatctttccagtagccctcaaatttataggcataaagatctttcccatcatttaacagcgtaggaatgatatcttttccgaaatcgtggttggaatccggatttttcatatctgtcagcagcattttgcgaagcagcttccagttaaaaatgtaaatccccatggatgccagattactttttgggtgttccggtttttcttcgaactctacgatacgtcctgtagaatcggtattcataatcccgaaccggcttgcttctttgatcggtacttcgatcacagcaatcgtggcatctgcaccgcaggttttgtgataatttagcatggcatcataattcatcttataaatatgatcaccggacaggatcagaatatattccggagcgtaggtgtcaataaaatcgatgttctgggaaatcgcatctgcagtcccccgatatacatccagattggaatctgctttctcacgtggaggcagtacatagactccactgtctttggcatccagtccccagcgtctgcctgccgcaacgtagctgttcagcaagatcgattcatactgcgtgagcacaccgacaatatcaattccactgttggcgcagttggagagtggaaaatcgatgatacggtattttccgccgtatgaaaccgcgggttttgccactttatttgtcaggtcatgcaggcgggtgcctcgtccgcccgccaggatcattgctaacatattattttgcttcatagtgaatcctctctttcataaacttttatatattatacaattttttagtagatttttctatgattatgtgcaaaatgttgtatatatatctgattgagaaagggaagacgtaaaacgaattgcaaataccacaagaatgaagtatgctgacagatagaatcaacagaggaaaacaaaaaacggaggtgcacaatgaaattattggaattttgggaggaaatatccctgatgccggacgctgtgcggcagcttgaaaagctggagatcacagaaggggaatatgagaagctgcgggagttatttctcagagatgtgaatttgttttatgaagcagtgaaaaaaagagaagatttccggctggtatttttatattgtttttcaaaaatggcctgtgaggtttatgatcggtattgtgaacaggggatttccagacgggtttaccgggatacgttttatgatctgacattgtggtgtgaaaattgttataaagcgtatggagaatatgggattgcgcagtacgactggttttgcagacatctggatatgagtctgtttcggcttgggcgtctggaatttgagaggatcccgtctttatgggagatacagacagacgggatatcggttcacaaaggagatcccgtgatcagcgtgcatatcccgcagggagagaagctggagcttgatgcctgtctggattcatttcgtcaggcagaacaattctggaaggagaagcaggtatatctttgtcattcctggcttttatatccggggctcaaagaaattatgaagccggaatctaatattttgcagttccagacattgtttcatattgttgcggttgattttgaggggagagaggcagaagagaggattttcggagaattggagacggatccccggaactatgcagaggacaccagtttgcagagagcagccagaaaatatctgctatccggggagaagtttgggagcggactcggggtatggacaggcggagataccgcagatcatattcacacatggatacaggaacacacagaagaactggttaacacagctgattatatttttcggcatccggaactttccaaagaagaagtcgtatcttcagcctgtctttctgactatctggaagaaaaaggatttcgtattacaaaaggaatcgcaggacttcagaccgcatttgttgcagagtggggaacaggaaaaccgatacttggatttctggcagagtatgacgctcttccgggtcttggccaggagccggtctgcacgtatcagccgctgaaaacgccggggcacggatgcggacacaatctgcttggtacagcctgcgcaggggcagcctgtgccttgaaagagcggatggaaaaagcgaagctttccggaacaatccgggtgtatggctgtccggcagaagaaatcatcatcggaaagatccagatgaatgaagcgggggtgtttgatgatctggatgcggcgatcacctggcatccttttgaccggaatcgggtgagttatgatatctggcaggcgcaggacatgaagaattacaaattttacggagtcaaagcacatgcgtccaaacatccggagcttggcagaagtgcgctggatgcggcagaactgatgaatgtgggagtgaattatttacgggaacatgtggcggatgatgttcggattcattatacatatacgaacacagacggaccggcgaatatcgtgccggattttgcttctacgaattactttatccgttcatccaaacgttccaggacagaggatgcatcgaacagagtggatgactgtgcgaagggtgcggctttgatgaccggaacgagagtggagatcgagcttgtgacgagcaatcaggaaatgaaagtgaaccgtccgctggcagaagtattttatcaggcaatggaacagaccaatcttccggaatatacagaagaggagctgcggtttgcagaaagcctcacaaaagaagcgggactgatcaatgacggaaattattttggaggtctggaaccgttggaagaccaacctgttttgctggcgatcggaacggatgtgtcggaagtcagtcataccgtgccgactgtgatgctcagtgctgctacgatgtgtaagggtacaccgctgcatcactggagtgcagccgcacagtccggaatgagcatcgggcagaagggaatgctgtatgtggcagaatgtatggcgaaaggggcgcttggtctttttgaagatccaaagattctgaaagaagcatggagagcgcatcaggaataacaatttttgaaaaactgcatatggtaatccgggaggtggtaagatgttttcagagatacagaccattccggatgccgctgcagagatcaaaggaagcccggaatttccaaaaatccggggaatggtatattttttcggagttcacaatggaacgatcgtggcagccgatatccgcaatctgcctgacggaaatgcgtttcacggatttcatattcatgagggaacctgtcagggaacaaaagcggaaccctttgcacaggcggacggacactacaatccgacaaatgccatgcacccgcagcatgcaggagatatgccttcacttctggcaaatgacggaaatgcatttttgatcttttacacagaccggtttcatcccgaggatgtgatcggaagagcggttatcatacacgcacatccggatgatatgacaacccagccttccggaaactccggcgctatgatcgcgtgcggagagatccgggaaatgaaggcagaataagaaaagcctaatcttccgggcagatatccttttttaggaacacatattctgtcccggaagatagagactcttcgaaagcaaatccaagtccggtgaactgtttcagatcttctgcagtctgaatctggtgttctgccatccagcggaccatttctccccgcgccattttcgcgagcgtggctttcacctttacttttccctgaacgaactcgccgaaaacgcaggtgacgcagtgtacgtcttctgtcagataaggaagtactgctttgctgtattctgcggaagcgagattgatgagctctttcggagagtctttctcaaatttacagtacaatgcctgatatagctgattgttccagaaatgatacaaatcagtggcattctcagtttccagtttggtctgcatctccagacgatagggaatgacagcatctgaagggcacaggacaccataaaatccggaaagaatgttcagatgccggtttacgtagtcccactgtgtatcagaaaagatgcccggtgcgaggtattggtattggatcccttcataggcgagaacagcgggagtgacagcgtcagccggtgtaaattcgcacagtctttttgtattttgaagtgccagtttttcactgcatttccaaagtttctgcaattcttcaaatgacatctgctttagcgtctgatataaaaggtctgtctgttctgcaaaaacaggtgtggtggcagtgccgggaaattcttcgcatatattcatttttttcgcaggtgaaatgatgatttgaatcataaatggtggttctccttttcttgtgtatgctctatgacaacgtttgtttctgcatccagtatgcttcttaattcctccagccgcggatcgcctttgaagtaggaggctccgtaagtgagattgaatgcataatcaaaatccggtggattttttccctgattgtgctgcaggatcgtctctgctttatccagtgcctttaccagatgtgcttccggggtggagcagttgttgtattcgttccacagggaaagaaattctgaccgttttggctcggggagaagctggaagatccgacaaatatcaaggtattcctgtttggattttgcaaggggatccgtattggaaattgcaggaatatctccggcatagagttctccgagatcgtggatcagacacatggaaagcacttttttagcgtccagctccggaaattcatcgatcagagtcagagcgagcagcgcaagacgaaaagaatgttctgccgtactttcctgtcgtcctgttttggtccaggcagtgcgggtgacagatttgatcccctctacggtgcggataaaatccaggtattcgttgagatgttccatagaatctcctccttgtgaaaagttcaaaataaaaggttataattgatgtaaacaataattatcatacgatattttcggatggaaagtctaccataacaggcagaaaagtgttattatcaacaacaaagtacaacaaggagtttttagtatgaagaaaataattttagggtcagcttcaccgaggcgaaaagagcttttatcacagatcggggttccgtttgaagtgcgtgtcagcaataaggaagaagtgtatacaaatacggttccaaaggagattgtaaaagagctggcgctgatgaaagcggaaaatgtggcatccgagatccaggcaaggaatgtgatcgtgatcggtgcggatacgatcgttgtgcatgaagaacaaattctgggaaaaccaaaggatgaacaggaggcctttgagatgatccggtcactgcagggagatacacatcaggtatatacgggtgttgcggttctggattttgataaaaacggagaaaaaacggtaatcaaccacgcagtggaaacaaaagtttctgtcaatccgatgagcacagaagaaatccagaaatatgtagagagcaaagaacctatggataaggccggggcttacggaattcaggggagattttccgcattcattgagaagatcgaaggggactatttcaatgtcgtaggacttcctgtttcttacgtatatcaggtgttaaaagaactgggggaggtataagatgcgaggcagaaaaacagcggcaaactgcgaaagctgcatgaattatgaatatgatgacgattatgagtgctatgtctgtacgcaggatctggatgaagatgagatggtgagatttgtgcagggagatttcagagagtgcccgtattatcaggtgggggatgaataccgggtggtgaggaagcaaatgtgagagagcttatgcgaaaagtccgcaaaagatatgtagctttcaacacaaatcaggctccgccgaagaaatcccttgaagtggctgtaacgcctgttggatatgttcgccaattggctcacatataacagcctaacagccaaaatcaagtgtatttcctcgctgcgctacaatgatttgtttatgaaagctacatatattcacaaacttccgccattttcccgcagccatttctgtgcttttcggtaatcgggcagtacggattctacaatattataaaaggcttttgagtgattcatttccagacggtgggcgagttcatgtacaacgatgtagtccacgatttcttccggagcgaagatcagacgccagttatagtttaaatttccggcgctggagcagcttccccagcgggttttctgttcccggatggagatacggccgtaggtgacgcccatgatacgggcataatattctgtcttgcgtgtaaaaatatcccgtgcaagctggatgtatcgtttccggtcattttcagaaatctgaggtttttcagaagattgctcaagacgctgagatgccgagtccagatgctttaggatccaggcttgcttttcgtaaagaaatgtatcaatggtcggggcaggacagtttttgggtgcccggacacggaccgtcgcctgtgcagtaatctgaattgcgagggattttctgtcactgtatatgacttcataaggaaagggatgctgcatgaaattctcctttgtaacaattattttagtttcagtttagagaaaacaaaaagaaagtgcaagatataatttataaaaaggttttgttgtttttgtagaaaatatgaattgctttattctggaaaaagagtgtataataaatttattcgtaagctgtattcttgcagcacttttgagttttaaaagttcagaagaatctaaggttcaatattcaggccaatcagccggtatttatccaatgttttgaaataagatctttgctgatggaaataatacagaaaatgactgttgaaagggttaaatttatcatagtagaaagcaggtgagaacatgattgataagaactattttggcgaaggaaagaatattgaatttaaaagagaaattccaggtaatcatgagaaatttttaaaagatattattgcattttctaacagcacaggtgggaaagtgatagtaggaattgaggatgaaacagggactgtttatggaattggcgaacaaagcccatttaaattgtcggattccatttctaatatggtttcagatgcgtgtacaccacagattgaaccggatatttcaatccagacaatagaagaaaaaacggtacttgtcatagatattgttcctggaaagttcagaccttattatattgcgaaaaaaggaaaagagactacagcttttattcgaattaatggaacaagcagacctgctgacgcaagaaaattaaaagagttagagttggaaggccagaatatttcctatgattcactacaggaaataggaagagaatttgacaaagaaaaggcattgaaactttgcgaaacaatgaaaaagatagcagttatatcctgtaaaacagacgaaaaaaatgcagcaaaggacatgactatagagaagcttgaagattttggaattctttgtagggtagggagaacgctctatccgacacatgcatttgatctgatgacagataacaaaagtaaagcatcaaaaattcaatgtgcattatttaagggaacaatcagagatgtttttattgatcaaaaagaatttgatgggccaatttacgaacaggtggaaaaagcatatcaatttgttttaaggcatattaatatgggggcagaaatcggagggatatatagaaatgattcttatgaacttccagtatctgctattagagaaatgattgccaatgctgttgtacacaggagttatgtagataagtcttgtattcaggtgagcatttttgatgacagagttgaggtgttatcacctgggatgctttatggtggattggatattgaaactgcaaagttaggaaaatctacttgcagaaatgaagcgattgcagaagcgtttcattatatgcatatagtagaggcatggggaacagggataccgagaattataaacagatgtagagagtatgatttacctgaaccgacatttgaagagtttggaaatggatttaaggttacaatgtttaggaaagtaagcaacgccaatgaaaaagtaagcaacgccaatgaaaaagtaagcaacgctaatgaaaaagtaagcaatgacaatgaaaaagtaagcaacacttttgaaaagtatttgccattattcaaggaagcagagattacggagaaatttattgagaatagtggcagagtatttctggaaagtggagtagacaaaccatttggacaggcaaatattatggaatggttaggatgttcaaaatccaaagcaacaaatgttatgaatgcaatgaaggcagcgaaagtcataaaaaaagtcacaggactgggtgcagggaagtataagtttatagaactatagaaaaaagagaaggtctctcaaggaaggcaccccaacagaacaatcttgcaatcccgatgttatctttctataatattcttaagtgtaaaggaaatggaagtatcgtttgaaatgatacagaagagcagaaagggagtggggaatgaaagaaaagaaagagaaaaaacaaaacggctatttccgccatatggcggaagcgataaaaatggaactcagggaacataaaagttcatttatggtgtatcttattttgcggattctagtgatcgtgatgttggtgctccaggttttgaatcagaattatgaaaacgtatttttatgcattctgacacttttgcttctgatcgttccaagttttgtgcaggtgacgtttaaaatagagctgcctacaacgctggagattatcgtattgttttttatatttgcagcggagatattaggtgagatcaatgaattttatctcctgtttccgttctgggacacagtgctgcatacactgaatggatttttggcagcggcaatcgggttttcgctggtggatctgctgaaccggagtgagcgtaccgtatttaatctgtcaccggtgtttaccgcaatcgtagcattttgtttttctatgacgatcggagttgtgtgggagttttttgagtttgggatggatcagtttcttggatatgatatgcagaaagacacggttttgtctgcaatcgcatcggtaatgctgaatccggatggaagaaatgttccggtgacgattgatcagatcagggaagtgatgatcaacggacagccattaggagtaggcggatatctggatatcgggctgattgacacgatggaagacttgtttgtgaattttatcggtgcagcagttttttcggtaattgggtttttctatgtgagaagccgtggaaagggcgttgcaggcatatttattccgagaagaaaaagagcggagagagatttcctcaaaattgcaagagaacaatctctagaggagtctgaaaataaggagaaaatacaatctcaaaagagagaataaggtggaaagaggactttttgtacacagaattgtgcttctatgtgcagaaagtcctctttttttatggtttcagagagtatttccacaaacagaacgataggtgtttcacaatattatggaagtttgatgaaaaaagtgcgagggaattactgtatattagtgaaaaaagactggagcgaaataaaaatgacgaaaggtcagtaaaataaggctgaaatattcctaaaaaaagaaaaaaacgtattttaaaagactggaaatttcgacaaaaaaaagagtacgatcagaaaaagaaaatcaaaaatttttttgttgacaaacccacttgctgggagtaggatttagataactttttaggcacactgtctgaaaaggggacttttgtatggagatttcaagatatgaaatttccttattttatgctcagaagaggcctccacctggaagagaaaagggaagaccccgaaaaagggcaggaatgaaaaaatagacaggaaaaggagggagcgatacggaaaatttagcaacagaattgatggaagagctgaactgcaaaacggtatttgagcttccggttctcggcggaatttcagaatctgtggttgttacatggatcattatggcagttctggtaggattatcgttgattctggtgagaaatctgaaggtagaaaacccgggaaaagttcagttggcattggaagctgcaattgactgggcaacggatttctttgaagggatcctcggtaaagggaacaaaagatatataccgtatctgatcacagttcttctttatctggcgtgcgccaacatgattggtctgcttggctttaagccgccgacaaaagatctgaatgtaacagcagcacttgccgtgatgagtatgtgcctgatcgaatattcaggaatacataaaaacggtatgaaacattgggtcaagcattttgccaaaccggtgccggtggttgcaccgattatgattctggaaatttttatccgcccattgtcgctctgtatgcgactgtttggtaacatgctggcaggatttgtggtaatggaacttttaaaagcatttgttccgctgattataccacttccgatgaatttctatttcgatatttttgacggtctgattcaggcatatgtatttgtatttctgaccgcactgtttatgacagaagaacaggaatagaaacggaatttttgaacaaataaaagaataaaaaggagattagaattatgggagcacttattgcaattggagcaggaatcgcagtattaacaggtattggagcaggagtgggaattggtatcgcaacaggaaaagcagtggatgcaatcgcaagacagccagaggctgaaagcaagatcagcaagaacctgatccttggttgtgcacttgcagaggcaactgcaatttatggatttatcattggtattctgatcgtattcttcttaaaataagcaaatagaattaacaggaaaggcgggtgtgggaagtgctgagatttgatatgaactttctatataccatgattaacctgatcgtcctggctttcttattaaagaagtttttgatcaagcctgtgaccgacattatggaaaagcgccgtcagctgatcgaagacggattgaaaaatgcccagaatgcacaggaagatgcgatgaagatgaaggaagaatatgcgcaggcacttggcggggcaaaagaagaatctgtgcggatcgtagagaaagcacgtaaggacgccaaatcagagtatgaacgtattgtagaggaggcggatgccagggcaggcagtatcatcgagtctgccaaggcggatatccgtgtagaacgagagcagacaatgagtgcactccagtctgaaatcgcaggacttgcaatgacagctgcagcgaagatcgtggcagaacagacaggcaataatcaggaaatatatgataagtttctggaagaagtaggtgaagctcatgaagacacagacaacaactagtcagatgtactgttcatctgcagcaatgcggtatgcacaggtgttgtatgagctgaatgttccgaaggaagccatacagaaagcaagagagatatttgaggaggtaccgcagcttcatgatgtgtttgtgaatccgacaattccggcacagaagaaagaacgtgtgatcgacaaggtatttccgcaggaaatgagaaatttcctgaaagtggcatgtaaatatgagagaatggatttgattccggagatatttgctgcatatgacagatattgtgacgagcaggatcggatcttaagtgccgtattgacatgtgtagagctgcccagtgacgagcagctcaaaaatatggaagcgttcctttgtaaaaaatatgaagcgagcaaggccaggattgagattcagacagacagtacgctgcttggcggatttgttctgcgcacaggaagcgatgaatatgactggagtctgaaaggacgtctggacagactaggacaaaaattaacctggaggtgaacaaggtgagttcaatcaattcagatgaaattatttctattttaaaagaagagatagaaaattttgacagtgtgagcaaagacagcgaagtgggaacagtcgttgctgtaggtgacggaattgcgactatttatgggattgatcacgcaatgtatggagagattgttaccttcgatacgggtttgaaaggaatggtacaggatattcagaaaaatgaaatcggagtcattctttttggacgggacacagatatcaaagaaggaacaaaagtaactcgtacaggaaaaaaggccggtgtaccggttggaaataaatatgtaggaagagttgtcaatgcactgggggctccgatcgacggaaagggtgagatcgaagcagatgattaccgcccgatcgagcaggaggcgccgggaatcattgacagaaaatcggtcagtgtgccgatggagacaggaatcctttctattgatgcgatgttcccgatcggacgcggacagagagagctgatcatcggagatcgtcagacaggaaagacatccattgccctggatacaatcttgaatcagaagggaaaagatgtgatctgtatttatgtggcgattggacagaaggcttctactgttgcaaaagtcgtaaatacattgaagaacaatgatgcactggattatacgatcgtggtatcttccacagcaagtgactgtgcgccgcttcagtatattgcgccgtatgcaggaacagcaatggcagagcattttatgtatcagggaaaagatgtgctgatcgtatacgatgatctgtccaaacatgcggtagcctaccgtgcactgtctctgcttcttggacgttctccgggacgtgaggcatatcctggagacgtattctacctgcattccagattgttggagcgttccagccgtttaagtgaagagcagggcggaggttctatcacagcacttccgatcatcgagacacaggcaggagatgtatctgcatacatcccgaccaacgtaatttctattacagacggacagatcttcctggaaagtgatctgtttgcggcaggtatgagaccggctgtcaacgtaggtctttccgtatctcgtgttggtggtgccgcacagacaaaagcaatgaaaaaagcatccggaagtatccgtatcgatctggcacagtatcgtgagatggaagtgttcacacagttcagttcagatctggatgctgcaacaaaagagcagcttgagtacggaagcggtctgatggagcttttgaagcagcctctttaccatccgctcagtctgcatgaaaaagtcatcacattgtgtgctgctacacataaagtgatgcttggaatagaaaaagcaaaaatcaaacagttccaggcagacctgcttcgtcatttcgattcagattatccggaaatcggacaggaaatcgaagagaaaaaggtactgacagaagaactgatcgaaaagatcgtggagaccgcaaaggaattcaagaagagcaggtgttaatatggcaaatatcagagaaatacagagccgcatcaacagcgtaaaagatacgatgaagatcacaaatgcgatgtatatgatttcctcttcaaaaatgacgcaggccagaaaaaaactggcggatacagagccgtatttttatggacttcagggtgagatttcccgtatcctgcgccatgtgccagagatccggcattcttattttgatgcccgccaggatatcccggcagagcagaaaaggatcggttcgatcgtaattacggcagacaagggacttgccggagcttataatcataatattatcaagctggaagaagagatccttgcacagccggggattcacaagctctttgttgtaggtgagctgggacggcattattttgcaaaacataatgtagagattgacacaaatttccagtataccgttcagaaaccgactatgcaccgtgccagagatattggctggtcggtgatcgatcagtttctggcaggggagctggatgaagtgtatgttgtatacacccgcatggagaattctgtacaggcagatgcggaaaaattgaagctgcttccgctggagaccaaagactttggaagtatgaaaatgcctctgaatatgtatcgggaggcaattgaactgtatccgtctgcggacagtgtaatggacagtattgttccgaactatgtcattggtatggtctacggatgtctggtagaagcatatgccagtgaacacaatgcccgtatgatggcaatgaaagctgcgacagacagtgcacagagcctgatccgggaattgtcaatcgtatataacagagccagacaggctgcaattacccaggaaattacggaagtttgcagcggtgcgaaggcgcagaagcagaaaaggaagtgagaatagcatatgaataaaggacgaattgtacaggttatgggacctgtcgttgacgtagtatttgaagacggcaatcttccttatatcaaagatgctctggaagttgaaaacaacggaaagaaatgcatcatggaggttgcacagcaccttggaaacaatgaggtgcgctgcctgatgcttgctgccagtgaaggactgcataaagatatggaagtaacagccaccggagcaggaatcaaagttcctgtcggtgagaagacactgggcagactgtttaatgtattaggtgaaacaattgataatggagaacagatcgaggatgcagaaaaatgggtgatccacagagaaccgcctacatttgaagatcagagccctgtagtagagatcctggagacgggaatcaaggtcattgaccttcttgcaccatatgcaaagggcggtaagatcggattgttcggtggtgcaggagtcggtaagacggtgctgatccaggaattgatccgaaacattgcgacagagcacggtggatactctatttttaccggagtcggagagcgttcccgtgagggaaatgacctctggtctgaaatgaaagagtccggtgttctggagaagactgctttggtattcggtcagatgaatgagccgcctggagcgcgtatgcgtgtggctgagactggtttgacaatggcagaatatttccgtgatgaacagcatcagaacgtacttcttttcatcgataatattttccgttttacacaggccggatctgaggtttccgcactgcttgggcgtatgccgtctgcagtaggatatcagccgacactggcaacggaaatgggtgaattacaggaacgtatcgcttctacaaagaacggatctgtcacttccgtacaggcagtttatgtgccggcggacgatttgactgacccggctccggcgacaacatttgcacatctggatgcaacgactgtactttccagaaagattgtagagcagggtatctatccggcggtagatccactggaatccagctcccgtatcctggaagcagatgtagtcggagaagagcattacgaagtggcaaataaagtcatcgcaattcttcagaaatacaaagaactgcaggatattattgcaattcttggtatggaagagttgtcagatgaagataaggcaactgttatgcgtgcgagaaaaatccagagatttttgtctcagccattctttgtagcagagacatttacaggaatccctggaaaatatgttccgttaaaagagacaatccgtggatttaaaatgatcattgatggggagatggatgcatatccggaatctgcatttttcaatgtaggaactattgacgatgtcattgcaaaggcaaatgctgaggcggcagaataggagcgtggcatatggatacatttggtttgaaaatcatcgcaagtgacagggttttttacgaaggacgctgcagaaagcttgtaattccggcgccggatggtgaaaagggaatcttgccgaaccatgaaaatatggtgattgcagtgaagatcggaatggcccgtatggagatcgaagaaggaaactgggtagaagttgcactcggaagaggatttgcagaggtagtcaacaaccgtgtgacactgctggtagatacagcagaaaagccggaggagattgatatccgtcatgcacaggagcagaaagagcgtgcagaggagcgaatccgccagaaacagagcatccaggaatattatcattctcaggcatctctggcgagagctatgaaccgattgcgagtatctcagggaaaacgctggaatttatagagaaaagaaacaaggaagtttgcgcaaaaggtgcagcttccttgtttcttttcacatatagtaacttttacggagttactgttcccaccaatctccacctatccatgcgcaatcgtcgtgcttgcgcactccagtaccgcacttcgtgctagattgcttatgtatgggcggtgactggttccaccagatgttaaatatagattctttgccttacatgcaagcatgacggttcagaacctatatttaacatccggtgtgaacagtaacttttacggaaaaatttataacatattcatggaaatttaattgtgtcccaacaaaatttcaagtataataaaaccaatcttgaaaggaatccctttcagttttcaaatatggcataagaggccattcaaaaataatttccaaataaacgcacagaaaagatggataagacgttaccgtgcatagtaacaagagaatagatggagtttgtctgtatttgcgattgtgaaacatcgtgtcaaaagatataataaaattaagaatacagttacatgctcatcgaaatcttctgaattccatcagaaaccaaggaggagcatgtatgaagaaggaaaaaacaacacaatttttaatgaagccaaaagtagatttctgttttaaagagctgatggaagatgaagaggtgcgcaacgcatttctggcggcggtacttggaattgatctgggagaaatcgttgagagcaggattttgccgtcccatttgcgccagaaggataaagatgataagttgggaattttggatgtacgggttttgttaaataacaaggagcagattgacattgaaattcaggtgacagctagtgaatactgggcagaacgcacgttgttctatctggggaagatgtttaccgatcaattaaaaccaggagaagactatcagaaattagaaaaatgtattcatatcgggattttgaattttaccatgtttgaagatgaagaatattactcctgttttcacttctggtcagatcaggggagaaagatgtacagtgataaagttgagatccacacattggaactcccgaaactggcaaaatatgagtatccggagacagagctgctgaaatggcttcagtttatcaatgcagaaaccaaggaggaatttgaaatggcagcggaaaaaagcgaatatattaagaaggcgtatgaggatttgaaccggatcagtgcggatgaggagaagcgtctggaatatgaggcaagagagcgtgcgattcgagatcaccagtacttttctacggtttataaaaacactggattgaaagaaggcagaagggaaggcagaagacaggcaactgtagaattattacaggaaatgggaatggaaaaagaatgcgtgtgtgcaaaggtacaggaaaagttccagctttctttccaagaggctgagcaggaagtagaaaaatattggaaataatagcggtagcttttttgtttttaaaactggcatggttaaaaacgttaaaactggatatttaagaaaagccaatcttaatgtagtattcatataaaaatgatagcaattaagaggaggtacagcaaatgagtgcagaaagatatgagctcaacaagcagttagcacagatgttaaaaggcggagtgatcatggatgtgacaacaccggaacaggcaaggattgcagaggaggcgggagcatgtgcagtgatggcgctggaaaggattccggctgatatccgtgcagcgggcggagtatccagaatgagtgatccgaagatgatcaaggaaattcaggaagcagtatccattccagttatggcaaaatgcaggatcggacattttgttgaagcacagatattagaggcaatcgaaattgattatattgatgagagtgaagtactttctccggcagatgatgtttatcatattaataaacgcaaattccaggtaccatttgtatgtggtgcaagagatttgggagaagcgcttagaaggatcaatgaaggagcttctatgatccgtacaaagggagagccgggaacaggagatgtgatacaggcagtcagacatatgagaatgatgaagcgggaaattgtaaaactggtctccatgagggaggatgagctgtttgaggaagcaaaggccctaaatgtaccgtatgaattggttgaatatgtacatcataacgggcgtattcctgttgtaaacttcgcggcgggaggcatcgcaactccggcggatgcggcgctgatgatgcagcttggtgcagaaggcgtatttgtgggatctggtatttttaagtcaggagatccgagaaagcgggcagaagcaattgtaaaagcggtaacaaactttgaagactacaggatgctggcagagctttctgaggatctgggagaggcaatggtaggaattaatgaacaggagatagaacttttgatggcggaaaggggcagatagaatgaagatcgcagtacttgcagtacagggagcatttgcggaacatcggaagaaaatagaagacctgggaatagaatgtatggaactccgcaaaaaagaggacctgatgaaaccgtttgatggattgatccttcccggaggtgagagtactgtgcagggaaaacttctgaaagagctggacatgtatcagatattgaagcagaaaatcgaagaaggactgccggtgctggcaacttgtgccggcctgatccttctggcggaaaatttgacaaatgaccggaatatttattttgcaacattgccggcagcggtgaaaagaaacggttatggcagacagcttggaagtttccgtacagtacaggaaatgaagggaatcgggaaaataccgatgacatttataagagctccatatattgaaaaagttggaaaaggagtagaagttcttgcggcagtagatgatcggatcgtggcagtaaaatacgggacacagtttgggctggcatttcatccggaattagatcaggacaacagaatacatgaaatgtttctggatacggttaaagcagccatacaaaacaatgagtctgctataaaataaatctataacaggatattctcaatctatattggacaaataaatcctactatgttaatatgattacaaggaattaagaaagaaacagattccaaagaaggaggaaatagaaatggcagatatcagagattctaaaaactggggatttgagacaaaacaattacacattggacaggaacaggcagatccggttacagatgcaagagcagtcccgatctatgcaacaacctcttatgtatttcacgactcacagcatgcggcagaccgcttcggactccgtgatgcaggaaatatatatggaagactgacaaatccgacacaggatattttcgaacagcgtattgcagcattagaaggcggtgtggcagcgctggctgtagcatccggtgcggcagcaattgcctatgcatttcaggcacttgcaaaggcgggagagcatattgtggcatccaagaccatctacggcggcacatacaatcttctggcgcatactcttccgctcacaaacgatgtgacaacaacgtttgtggaccctgagaaagaaggatcttttgaggcagccattcaggaaaatacaaaagcgatatttgtagagacacttggaaatccgaattcaaatctgatcgatctggagaaggtggcagagatcgcgcacagacacaatattccgttggtagtagattctacatttgcaacaccgtatctgatccggccgatcgaacatggtgcagatttggtgattcactccgcaacgaaatttatcggcggtcatggaacagcgattggaggcgtgatcgttgacagtggaaagtttgactggaaggcatccggcaaatatccgtggatttcagaagccaacccgagttatcatggtgtatcgttctcagatgcagcaggcagtgcggcatttgtaacctatatccgtgcagtgatcctgcgtgatacgggtgcaacactttctccgttccattcctttatcttcctgcaggggctggagacattatctctgcgtgttgagcggcatgtgagcaatgcgctgaagatcgtggagtatcttgcgaatcatccgcaggtagaggctgtacaccatccgtcactggaaacggagtcaacccatgaattatataagagatatctcccgaacggaggcggctctatctttacttttgagattaagggagatgcgcagacggcccaggcatttatcgatcagctgtctatcttttccctgctggcaaatgtagcagacgtgaaatctctggtgattcatccggcaaccaccactcacagccagtgtacggaggaagaattgttagatcagggaatcaaaccaaacacgatccggctttcaatcggaattgaaaaagtagaagatctgatcgcagatcttgatgcggcatttaaaggagtaaaataatggatattgatgttttagcgatagcggcagtggcgattacagtagttttgtttgtactgctgtcctatctgggaagaaaaaagcatttacgtcccagtccagcgtgggaaccattccggtcagcgtaaaacagctggtatccaggctgggagtcaatgaggatattgcgtcatttgtcgcagcccttggagcaaacctgggaatgccggcatgtgcgggaatctggccgacacttctggctgtacttgccatcaatatatttgatattccgtactccattggtcagtatgtatttctgatcgtattgacactgatcgtttccatcggaacagtaggagttccgggaacctccacagtaacaaccacagcactgtttactgcagcaggacttccggtagagatcattgtacttctggttccgatctcaagtgttgttgatatgatgcgtacggcagcaaatgtgacaggtgcggcaacagcagcagttcttgtggcaaaatccgagcagcttttagacagagaggtttatgaccagaaaaagagtgaagacggattgagcggagcagctgcagttggtgaatctgcgagataataaaataaaaagcattcctgccggaaatcatatgccaagaagcaatgatccatgcaggaatgcttttactttatgcctgatcctgataacaatatccgccgttttctttcactccgtaaaaatcagcgaaagacagatgaaaaacatctttttccataccggaaaggtcgatcttatgtttgatcagatattgataaattccggaataatcaatacttccctgtaataaaatactgtctaattttccatctcgtaaaattgcacgtttataattgtgggaatcttcctgttccaggactacatctccctcttcttcgataccgcgtccgagagaaagtgtgaccagaccatagaaattcatcgtatttttcatagcataacgatcatcgtagacagtttcgattccgcacatattgagagcagcgacctgtccctgtttcatggcatttggccagattccagataatccggttacatctccggcagcgtaaatatctttaaagctggtttccatggtgtcagacactttaataaaacgatctactttgatcggagtatccagtacgcattcaactgcgggacgaacaccggcagcaacaatgaccagatcacagtctacccgggtgccatcatccagaaggacatagtcgattgaaccattgctgttcatatgcgtttcagaagccttttttccaagaagaaaacggcatccgtgttcttcaaataatttccgataggcagttccggcagtttcatttaactggatcggaagaatacgatctgccatttccacaacagtaacctctttaccctgctcgagaaatgcataggcagcgtccattccaaccagaccggaaccaacgatcagaatctgttctgcctgatcggccagcgggcggatcgcctgagcatccgaaagatgccgcagtccgaatacattgtttgcctcacggaactgtccaacaggcgggatgaagctgtttgcaccggttgtgatcaggagtttgtcatagtggcaggatgtgtcattatcaagcagaacctgctggttttttacatccactgtttttacagaaacacccttgatccattcgattttattggtttcaaaaaagtcaggttctacaaaggacaaggtatcttcctgacgttcatggctcaaataacggtgaagcatgcagcgggagtgtacatgctcatctgtggaaatcatggtaatagaggcatccggctgctggctgcgaatggtttttgctgcggtgatcccggcagcccccactccgataataacatgcatcataatgacacctcctcaacatagattgcctgttttggacaggcttttacgcagttgggttctgcaccgtcctgcaggcagaagtcgcactttacgactttggtacgggtggcagtatctgctttgaggacgccgaacgggcagttcataacgcacataaaacaggagccacatttcgtttcatcataagatacgattcccgttttcggatcctttgtcagagcaccgctcatacaggacatcacgcattccggctgatcgcagtgtctgcaaaaaatagggcgataggttccgtccggcagcttttcgatgtggtttctggattcattgcggatgtccgtcagatccagatcataaacagttcccggtgtttcccggtgcgcctgcatacaggcgatggtgcagtttttgcatccatcgcactttgaggcatcgatcataattcgtctcatagcggcacctcctatatatgtaagccctggcgtttttccagaataatctgctccaggatatcagcagattctttcgcatctccgttgatgatgacctgtcctccggtcagttctttcatatcttctgtgagtactttgactgcagttttgcttcccgttacgaacggaggaagtccaaggtgcagcggaagtcccagtgcaagtccgaagcatccgtcagccagtgcctgctcttccagccactgtgcggcagaaagtaccagtggaagctgtggaagatctacgccaagctctgcggcgatttctgttgcaacgatttccagacggccgatcgcaagacaaggaccaaaattcaaaaccggcggaatgttcagtttttcacagacagcgcgcagctttggaccggcatatttggcagcttccggagtcatgagtccgcagttttcgattccgcctgaagaacatccggcagtaaggacgaggatgtcgcgagagatcagttcttttgtcagttccacgctcaagacatcatgtccgcctgcagtcaggttggagcatcccaccacaccggcaagacctttgatctctccggatgccagcagttcgattagcggcgtccactttccgcccaggaaggattttaaagaaccttcactgacacccgttaatgtatggtcatttccatgttcttccatgaggtgtaacgcaacacttccccgtcgttccttgtaggattcgatgattttatcaataataatgctgctttgttcttcgcggttttcaaattcaaacggcatcagttccgcattcgctttctttgcaacatcatccagacagatctgtcggatcttcaattcttcacagattggctcgattcccggaagagtacagttaaattctgaaagaactgcatcgatcgctccggttgccaggattgcttcacttgtatagttgtttcctgcatgaccgtcaaatatttcggtatagtgtgcgcctctgagctgtaagtcctgtcctacgcaggtacatcctaccagtttgaatccctttgcaccaacagcctgcgcttttgtctttgcttcttctgaaatcaggcgttcctgaagatctacgaaaatcgtgtgctgatgtccggtaatcataatgttgatgtaatccggatcgatcacacgcagtcctaccggggccaggcgaagctccggctgtccgagcaaaacatcgttgagcagattggttaaggtcagcccgtacactccggtggaaataccaagcttcagacagtcggtaagcatatccacagggtcggagttcagattggtggaacattttacaacacctttgaatacctctgcttttgcaccgcccggcatgattcccagttctttccagcgtttaatacgtggtgcatatgcgattttctcaatcagttctgcagaaacatattccggtttgtacagatcggcaagtacggcatctgccactttttctgcttttacatagacatcttcgtctgtaattccaaacatctccgccagatgctccagagatttcagaccctttaattctcctttgatctgggcggttttcttcagattgagggcagtattctcaacgatatggatatagcatccgctgccggaagccactgctcttaagaaattgcgggttacgatcgtatcggcatcggcaccgcagattcctctcggcgcatttggagtgatgcggcaaggaccgttggagcagagacgacaacagactccctgcagtccaaatccacattttgtgctctgtccttccacgcggtgatgggaagtttccatcggaagcgagcggataaagccttctagaggcttgtctgcgcttttgcatgtattgcatccataacattgattcattttgtaaaatcctcctttgataaaactgtactaaaatagtaaagattaaggcaaaaaaacacttaccgaaataattcggcaagagatttttgtttcatttcctgcaccagcatattctgcagccggcagaattcgtgatgtaccagacatggatttttcggactgttcatagaacaaggataaccctctttcatacattctaaaagaaggatatccggatctatggcagcgcagagatcatagagagaaatctctgcaagctttaagttgagcgcatatcccccgttggtaccccgacagctttttaaaaatccggacttttccagctttctggtaatcttgtaagtcatggcagagggcagatgctccatctcgcagatccgtgagacactgattaactctccggaagataatgcacgcatgatgcggattgcataatcacattctttggtaaataacatatctgacctccctgacgttttgtctcatcttacaatattggactgaaacagtcaagtataatggaagcggaaaaataaaatagggattatgcataaaaaaggcagagtttttgggcgataggaataaaagaaaagagagatatctatacaataccaccaaagtctacaaaggagattgacagatgtcaggagttatgcctataataaaatcaagatatgaaacgggtttcaaaaagtttcacagcagcaaaagaaagaggacataagatggcaagtatcagagaagttgcaaagatcgcaggagtttcacctgctactgtatcgagagtgatgaatggaacagcgaatgtggatgaggagaagaagcaaagagttcttgaggctattcaagaaacggggttcaaaccaaatgaactggcgcgggcattgtttaagaaatcatcaaagattattggaatgatcgttccgaatattgaaaatccatttttcagtgaaatcgccaaagcagtggaggaggaagcctttcaaaacggatataagatgctgttatgcaattcagcaaataatccgaagaaagaacggatgaacattcagatgcttgtacagatgcaggcagatggaattgtgatcatgaccaacagcgatcggaccggaaagaagattgcagaatgcggacttccggttgtcgtgatggacagaaagctttctgagggacgggaaatcgcatttatcgaatcagatcattacaaaggcggaaaacttgcggcagagcatctgattgaatgcggctgtcagcatattgtgtgcctgcggggaccgatgaagttttccagcgggcagcagcgttatcagggatatgaggatgtgtgcagaaagtatggaagaaaagctgtctggatcgactgtgattatgattacgatgccggacttgcggcagcagaagaactgattcgcagatacccggataccgatggaatcctggcgagcaatgacatggcggcaatggcagtctataaggtgcttcatcagaacgggcgaagagtcccggaagatgtacagctggtcggatttgacaatattgagttcagcaggagaatgacaccggagctgacgaccatttcccagcccattgaagaaatgggaaaactggcagtacagatgatcatccatcatggagaagagatttcgtatcagaaagaaaatatatttgatgttgagctgatcaggcgtcagacgacgaaaaagaaaggagaagcagaatgaaactggcagtagtaggaagcattaacatggatatgacggtgaccgcagagcggattccgctaaaaggggagacacttcgaggagacagccttcattatattccgggagggaaaggtgcgaatcaggcggttgctatggcaaagctcggagcaaaagtggagatgttcggatgtgttggagatgacgcaaatggtacccggttattggagaatttcaagaaagtcggtgtagagacgggacatatcaaggttttagagggagttccgacagggattgctatgatcacagtcggagaaaatgacaatacgatcatcgtggttccgggagcaaacgggaaagtggacagagattatattgacaggatcaaagaggagctgaagacttttgatatggttgtgctgcagcaggagattccgctggatacggtgtattatgttgtagatttctgttatgacaatcagattccggtagtgttaaatccggctccggcgtcaaacgttccgttggaagtgatcgaaaaagtgacgtatgtaacaccaaatgaacatgaagcggtcctgatttttggagaggagtattctacagaggacttgttaagagagtatccggaaaaactgatcatcacacagggctccagaggtgtgattacttgtttgaagaatggagaaatcttgagtgtaccggcgagaaaagcgaatgtggcagatacgaccggggcaggagatacgttaaacggtgcatttgccctgcagagagcaaaaggagcggatatggagacagcacttcggtatgcgaatgtggcagccagcttatccacagaaaaattcggggcacagagcggaatgccgatggcacaggaagtcgaagaagaattggaaaagctgggaggaagagcatgaaacaacaggggattttaaacagtgatatttccagagtgctgtcttatatgggacatacggacacaatctgtatcggagactgtggactgccgatcccggatgagacagaacggatcgatctggccgtaaaattcggacagccgtcttttatggatgtgttggaagaagtcggggcagatatgaaagtagagaagatcatactggcagaggagatgaaacttcagaatccggagatactccgtcagatcgaacaattttttgcaaagtatgaaacgggtttcaaaccagagatacaatttgttttgcacagtgatctgaaaaaaatgacaaaaacatgcaaggcggttattcgaaccggagagacaacgccttatgcaaatattattttacagtcgggttgtattttctaagagaggagagcagcttatggaaattgaaatgagagggatcaacaagtcttttgggaacaatgccgtgttgaaaaatgccggatttgtactcagtaccggagaaattcatgcactgatgggagaaaacggtgcgggaaaatcgacgttgatgaagattttgacaggtgtttatacaaaagatgcggggcaggtgatcgtggacggagaggaagtctgctacaaaaatgccagagaagcggaaaaagcagggattgtatttatccatcaggaactgaatgtgttatttgatctgacagtagaagaaaatatgtttctcggcaaagaaatcaaaaagaagtgcggtgtatgtgacaaaaaagcaatgcgccgggaagtagaaaaaatcttgaaacgccttggcgtagagatcgatccgggacagcggatggaagagctttccgtaggacagcagcagatggttgagattgcaaaggcgctgatggtaaatgcaaaggtgatcatcatggatgagccgacggcagccctgacacagagtgagacaagagtactgtttgaggctgcaaacgcgctgcgtgaaaggggtgtctccattgtgtatatctcgcaccggatggaagagatttttgaactgtgcgaccggattacgatcctgagggatggaacttatatcgacacaaagaagatttctgagacagacatgaatgatgtagtgaaaatgatgatcggaagagagattggagagcggtatccgcagcggaacgtaagcatcggtgatcgtgttctggaagtaaaaaatctgacctgtccgggcgtatttgaaaaggtttcttttgaagtgcatgcaggggaagtgctgggagtatccggattgatgggagccggaagaacggagatcatgcaggcaatctttggaaatatgccgcatgtgacgggagagatttttctgaatggaaaacagattgagaacaaaacgccgaaacaggcaatgaaaaacggaatcggatttatcacagaagaccggaaagtagaagggctgatgctggaagagagcattatgaaaaatatttctctcgcaaatctgaagcgtatttccagacacggggtgatccagagagagaaagaaaaagagctggtcaaaaaggggatcgaggagttacatatccggtgttttggaccgcagcatgaatgtaataacttaagcggtggaaaccagcagaaggttgtatttgcaaaatggatgtacacgaatccgaaagtgttgattctggatgaaccaacccgcggtgtggatattggggcaaaaaaggaaatctatagtattatcaatgatcttgccgcaaagggagtggcgattattatggtatcttccgaactgccggaagtgctcggaatgtctgaccgggtaatggtagtaagagaaggtctggtgagaggatttttaagcaaagaagaggcaaatcaggaaaatattatgattctggcgacaggaggaaatctcaatgaataagaaaaaagcggcaaattatatacaagatctgggagcgctgatcgcgcttgtattgttaattgttgtgatcggagcaatcagtccggaattccggacagtggggaacttcttatcactgcttcgacagtcttctattaacgggctcatcgcatttggtatgacttgtgtcattctgacaggcgggattgacctgtctgtaggttcggtacttgctctgacgacggcattgtgtgcaggatttatttcaggcggaatgccggtgggactggcaatgatcctggcgctggtgatcggaaccggatttggatgtatcagtggatttcttgtaacaaaaggcagattacagccctttattgcaacgttgatcacaatgaccgtgttccgtggactgacgatgatctatatggatggaaaaccgatctccaacctgggagacagctttacactgaaagtggtaggaaaaggaaacttttatcacattccgattccggtcatcttgtttttactgatttttgtgatcttcttattcgtactgcagaaaacaactttcggacgtcatatttatgcgacaggaagcaatgcaaaagcagccaatctggcaggagtcaatattgaccgcacaaaactggcagcttatgcgatttccggatgtatggcggcactttccgggttgattttattatcccgtcttggttctgcacagccgacactgggagaaggatatgaactggatgcgattgcagccgtagcgcttggcggaacgagcatgaacggaggacgcggaaaaatctggggaacattcatcggtgttttgatcattgcagtgttaaataacggattgaatatcctgggagtatcttcttattatcaggatgtggtaaaaggaattgtaattttgatcgcggtattgtctgacagaagacgataagagaggagagtgcggtatgagaatgaagagagttgtaagcatactggcagcggcagttctggtgtttggattgacaggatgcaatgccattacgattgacggagaaacggaaaacgcatcaggtgagatgtccggaaacggcagtattggattttccgtttccaccttgaataacccattctttgtcacattaagtgaaggtgcaaaagaaaaggcaaaaacagaaggggaaaaactgatcgtggtagacgccggggatgacgcggcaaaacagaccagcgatatcgaagatctgatctcaaaaaatatcagtgtcctgatcgtaaatccggtggattctgatgcagttgcaccggcagtgaaggacgcggtttcaagaggaattaaagtgatttcagtagaccgtggtgtaaacggagtagacgtagactgtgccattgcttccgacaatgtggaaggtgcgaaaatggcaacagaatatatggtatcacttcttggagaaaatgcaaaagtagcagaactggagggcgtttccggcgccagtgcaacgatcgagcgaggaaaaggattccatttggtggcagatgaaaagctgaatgttgtttccaaacagaccgcgaattttaaccgttccgagggaatgagcgtgatggaaaatatgctgcaggcaaattctgcaattcagggtgtatttgcacataatgatgagatggcacttggagcagtggaagcagttggaaacaagaaaatcctggtagttggttttgatgcgacagacgatgcagtcgcagcagtcaaagtagggaaaatggcagcaaccgtggcacagaaaccgaatctgatgggagagacagcagttgagaccgcgattcagattttgcagggagaaacagtggaaaaaaccatcccggtggaagtggagctgattacaaaggatactgcacaatagaagaaaatcgtaaaaatcgtcttttgcttgaggaaagtgaaaggcgattttgggattgggattttgcataaaaaagctggcagtgtttgtgtaaggagaacgatcggttgaattaaaattgatttttataagaagatgtttgagtaaatgcagactattagagaagggctgcacgggcaacagggaattgaaatatcagtaagaatatgataacacttcaagtagaacaaccgtgttacagggtggatgacctctattttacatagaatgggggggctgatgaacgataataaaaatcactttgattttaaagaccttatggccgttggaatgttcattttatcactactgacattcatttacatgatttgtcactgatgatttaagccatagaaaaaccaccctcaaaatgatatgatactttggcgagtgagggtggtattttctatgtacattctttaattggtcaaccccttgtgggcggttgttctttttgcattttcaatatagcacatctgcatcaattctgtaaggcaataggttacaatttacatgatttcttcgatatatttctactgattctgcagaaatgtcatagaacatcttcgtgcaattctccattatccattttcaaaactgctgaatattttttcatattttcacgagagagtctgtgagtcacgctgatacatgtgatattttccaatgataaaatgctgttttctacatcatttgcggtttgttcatccaatgccgatgttgcttcgtccattagcaggatatcttttccactcagtaatgctctggcgatagcaagccgttgacattcccctcctgaaaagttactaccgttttcttcaatgattgtatcaagtccttggggcaaatgttccattacttcctttaatccagcttttttaataacttctgaaatttcgttttctgtgtatgatttccacagagtaaggttatttcgaacactatcattgaataaaaaagttttttgatgaatcatagccagtctgtctggaagagctgcgatttcatctgtacaaatctctccttcgaattccggataatatcctgcaaggagttttaatagtgtgctttttccgcttccgctttttccgagaatcgcgtatttctttcctttttcaaaagtggccgatacattttttaagatagttctgtcatcgtacttgaaacttacatttcgtagtgaaatatgttttttgagtttgtgtcctgtttttttctcatggatttcaggatgagaaagagtatgcaaagtatccaatacaggtctggcagactttagttcgctaatctttgcagaaagctcgaaggcaggagaaatcacttgtccggtaagctgagtgactgcgacaatactgccaatcgtaatatatcctttgactgcgaaaaatccagccaaccccataataaagaattgcacaacgacagatgaaagcgtagttaccccatatacaccagccatcaaagatgaaaaatgctcttttctacgttctaatttttgagctgcaatagaaaacttatgaagcatctgctcttctgcatggtacgtctttaccacttcataaccattaagaaggtctgagactgtttcattgtaggctgttgtagattccatgaccatttgttgtgtttttccaagtactttattgaaaaaatttggcaataagctgggtattgacatagctataatggaaacaacagcaataataggattcatgtataaaaggagaataacagcaaatacaatacaaataatagagtctaaaatggaaatacggttttgcagcactttttcttcaatgatagaaaaattttggttgaatgtggtaacataggatgcatttcctgtattttcataatcagagatatttgcttgtaaagtacctcttgctaatatattacgcatctcgagcaaacattttctgatatagcaagctttgtaccgattggataaaaagatcagtatgcctaaacatacagcgtaaagaatgctgatcagtaaagtcttttgcaaatagtaggtatttccactagtaatagaaatttgtgctgcatcaattaacgcatttaataaaatcgcgacacctacagttgccatatttactagtaattctaagaaaaacagcaggatgttttcccattttatttttttcatcatcttgatacctcccttcgacaagtaaattgtaaagggaagaatgcggcgtttccatatcgagccatgtatagttttaatttacatcgtttgttaagttttctgctaaatattcttgagccaaatctgcgatttcttttttcccgatcaggcgcatatagggaatcagagattgtatacgcatacgactttcttgtttttttttgcatatgattcagtatttgggcaatactaaattcaatttccggaaggagaaactgttctgttccggaaatactgagattctctgcttttgttgcatagagaagcgcttcttgatatcgtccttcatccttcagaatttgacttagattatgcgctaaattgatctgaagaaccttatagtcagaaaggcggctatggctgtgttccagggcaaacagagtttcctcaccaatgcgaatcgcttctaaatttttacctgtcatatattttgcagctgtcagcatgacaagaatattagcctccgtaggggaaaacaactccctgcgaaaatcgttgaagtcgatatttggtttcgtcagatggagtgcgcttgttaattcagtttccatttgcttgtctgcagcaccatcatgcatacgaattgccacatgaatcattttggtgtactggagattagcgatgtccattttttcagtagaaagctgctgtaatgtcttttttgcctgaataaactcacctgcggatacttgttcactgatttcatctaaagtttggcgtaaggatgactgacactcgttttcataataaatattgcagagctgataagtacttgtgccaaggcgtgcaaggagttgttctaaaacttttcccgatggcatttgttttccgttttctatccttgagatagaaacaggggagcaaataccatctgccaatgcctcttgtgtcagtcctgcttttttacgtaaatgatagattgtttcacctaatgtatttttttccataagtttctgtattgctcctaataatttattctaatggatagaattgtatcattgaaatattctctgttcaatgatgtatttgttgttcaattttccatattgaattgtaaatatcttgttccttgaaatgtcaattttccttcatcgccctctgtaagctttccgtactctgagccggatacagacatctctattctgtcaccgctttccacttgaaaagtgacataataagtagtactggatgttgtatgatatccatgagctcctgaggtatctccagcgtttggctgattgtgatacgtggtattctggcgttttgcaacgattcttgctgatacagttaaacggggagaattattgtttttatgccaagtagaaatcccctttgccaaagtgaatataatcattataaagattagtatgaagatcacaggaaataacaattctattatattgaacatattttttctcctcacttattgtaattttgatttctccgttcatttataaaaatatctgtgactatttttcaggcggcaagtgcagatccagcatccgcacacccaatggattttctctctgacatacaacaaattctgttccggactcttccatttcatacaactcttcagtaacaggaaattcaaaagctgttccgtcatccaactgcacagtcaaagaatattccagagaatcatcgtcatcgtcttgttctatatttcgttccagtacttttgccggatagtgggtttcctctccacacagggcaaaattaccggcatacatcatcggttctgccaccaacaggagtgacagaccgatcatgaaaaacccttctccacgcagacgttttggagtgcgaagaacaaaggcgatgataaagattgcgccaagtccaaaccagaatgccagtgtgtaccatttttcttccataatcagtacttgctccagaccgtagtgaaatactgacatcagccacaatgcaggaagcaaaaccagagggagagaaatgcggatatggtgagactgccattctgcagtggcgcctttttgctttccgtttagtgtcaggacaggcgcaaacgccagataatatacaatcaatggaaggggagaagctgccatcaggtagatggtctggctgaacttcaaggctcctgcgatgaaaaagaaaagcggaatgatactgccggcccagaagagtgccagtaccagccatttcccaagtcggatttcttttaggtggctgtgaagtctggttgtatattcttcccgccattgaatgacaggttcgattccttcttcctgctgaatctgttgttcttttaactttgttatctcaagcggaatctctctggattcgacccagtccgccagtttgtctacgccgcgcatattacgttcgatcgcgaaaattttctttttgtccgcatttaaaaactgaatggagtcattggctccgaagcggatggaaaatcgctgtccgggaagaagttcacgtttgcgtccccagcttgtcatataagtcagacttccgttttcaaaaacgtacaatctgcggttttttccggccagcagcatccagatcccgcagatgagaagtcccagtccaatcagaaacataatcagaccaaatggaacatccagaggaggctggacgcagtatccgaaagcaatcaacaaaagaaaaagtgccagtggccagacaataaacgctaaaacagaaacgaaaagccgctcctggatacaaatgacaggacgggaatgttccggcagttttggagcacgacaaaccagcaaggcgataccggacagaagaatgctcacatgcatcacaattcccagtgcaatcccgacagaaggggcatcccccatataaaacagtgtcataaacagtcccaggagactgtacaaaatgatcacaataccggaaaggagtgccggccatttacgaggcggtttgacgggctctgctgtatttgaagagaatccagccggggattttactgtatcggatacagcatcttccgccgattcttctgattctgtcggaagtgactctgtgtccagatttgctccgccttcctgcagataaaggataaatcgttccatttcttcatagagattgtcatcgtttttttccaaaagctcctgtacggtctttccatcttcgagaaagcaggtacgaaaaccgtctgcccggatttcaccgtttttgcactttacagtcaaaagcccgggagcgtatgtgatatcacaatcgctataattagactgcagacgctgataaatagaattcaggtgattcatatagtgtgccctcctttgttaggttgtttgtttttgtattgtatcatattgcaataaaaaagtggagaaatggatataaaattggcaaaaatgacggagaaatagttgctgttgtccagtccataaaaagcgtgttaaaataaactggttagaaatattttagatgataaaggagcttgtatgaggcgtaatgtagatttaaatgagatttcagatggaaaattatatacttcaaatgatatggtaaaggcagattgttatgagtgtcaggggtgttcggcatgctgtcgcggaatggggaaatctattattctggatcccatcgatctgtttcatttgaaacaggcaaccggaaaggattttgccgggcttctgaatcaggagatcgagttaaatgtagtagatggtatgatccttccaaatttaaaaatggatcctaagacggatgcctgtccgtttctggatgagaacgaaagatgtgggattcatgcgtttcggtcgggaatctgccgactgtttccgctgggaaggctgtatgaagaagagggatttcgatattttcttctgacaaaagaatgcaaaaaagagaaccgcggaaaggtgaaagtgaaaaaatggctcggaattaccaacctgaaagcttatgagcagtacatttcagactggcaccaatttcttctgacttgcgaagagtcaataggagagctggaaaaagagaatatccagatccttacgacgtatattctgcgattgttttatcagactccatacgaagcagaggatgacgggtcattttatcaggagttttatcagagaagagaacaagtgcgaaagacgcttggaatttagaaagagaggaggtctggcagtggaaggggaaaaactacagattttaaaaacatattttggatacgattcatttcgtccgggacaggaggagatcatcgatcagattttaggcggaagagatgcgcttgccatcatgccgaccggggcaggaaaatctctttgctatcaagttccggcgctgatgctttcggggatcaccattgtaatctcaccgttaatttctctgatgatggatcaggtaaaagcattgaacgaagcagggatccatgcggcgtatatcaacagttcgctgacagaaaaccaggttgcaaaggctttggaatttgcaaaagcgggacgatacaaaatcgtctatgtggcgccggagcgtctggagactccaaggtttctcgactttgcctgtcatgccgaaatctctatggtgacgattgacgaggcacactgtatttctcagtggggacaggatttcagaccgagttatgtgcggattgtttcatttatccgccagcttcctgtccgtccgatcgtgacagcctttactgccacggcaacaaagcgtgtacagacagacatccgggaagtactgaagctgcagaatccttatgtggcagtgacaggatttgaccgggaaaatctgtattttgaggtgcagagaacaaaagagaaaaaagaaagaatccgggagtatctggaaaaacattcggatgaaagcggaattatttactgtgccacaagaaagaatgtggatgaactttacctgtttctggaaagtgcgggattttcagtgggcagatatcacgcgggaatgggcaatgaggcaagaaagagcagtcaggaggattttatttacgatcggatccaggtgatgatcgcaaccaatgcgtttggaatggggattgataagtccaatgtccggtatgtcctgcattacaatatgccccaaagtctggaaaattattatcaggaagcgggaagagccggacgggattcggagccgtcagaatgcatcatttactattcgcctcaggacgtcgttatcaatcagtttctgctggaaagcaaggaaaactatggagaatacacagcggaagagatgcagaatatccaggtgcaggatcgggagcggcttcagaagatgacaacctactgtacgactacgggatgcctgcgaaattatattctcggttattttggggaacaggcaaaagagctctgtggaaactgctccaactgtctggaggaactggaagagatggatgcaacagaagcggcagcagatgtgattgaatgcgtccgtgagtccgggcagagattcggggtgaacatgatagcaggcacgctgctcggcgaaaatactgcaaaaatccgaaattaccggatgaacgacaatctttgttatggaaaacaaagcaaaatcggacaggaacgcatcaaagagatcattcaggcgatgctggagcgaggctatctgtgccagacgaaagataaatacgcattactgaagctcacagatacatcagaagaattgcttcaagggacggatccgtttgtgatcgcatacagaaaagcggaagtacagaaaacatctgcaaggcgaggtgtgaaaggactgggagacctgagtgaaaaagcgcagcatctgtttgaagaactccgaaagctgcgcagcgaactggcaaaagaaaaatccattccgccgtatatggtggcatctgataagacgcttcatgatatgtgcgtgaaaatccctctcacaaaagaagaaatgctgacagctaacgggatgggcgccagaaaactggaacagtatggggaggcgtttttatactgcattcgtgatattacgaatggagataaggcggcatacggagccgaggaaacgaactatggtgcttcagagattccgctgacagagcgggcaaaaaaaggaagaaaagaggcatttcatctgacagaggaaatggaacagcagatcgcttttgtcacggagacgacaatcagcgaattcgtggcatctatcaatgcactgcgggatgaaaagacgatgaagcgtctgacgatcaaatccattactgaggaacttctggcagaagggtatctggagcagaagttctggaacggatacagcagaacctttctgacagaaaaaggagaagcgctgggcatccgggcagaagagagggaaagtcagaacggaaatctgtacgatgtctttttatacggggaaaaagctcagcagtatgtggtagagttattaaaaagaaacactacagcggactgattccggcaaatccgctccagatacaggacagtgtaaataaaattccaaaaacggaagtaaaatataaaaataacagtttccccgtattgtgagactcgctgctgcagatgcggggaatggagcggtattttcgaagcaggagcacaattccaaggatgacgagcagattggtgatcacattgtacaggatatttccgctgttgccaggcattatgcctgcaatacggggcagaacatctcccaggatcagattgttggaaatatgcaaaaggagactgtaccagatcgagtattccatagcgatatatccaaggatcagtccggcagccattgcaaaaggaatctgtgcaaaatttccgtgcatgagagcaaaggcaagtgaggaggccaaaagtgcgaaccacttgccgaaaggctccaatgtctttaaaacagcaccgcggaaaatgaattcctcgatcagcggagcagcaaatccggagtagagaagcatagagatcgtaacagagcctcccgtagcagcttccagagaacgcgcaaatgtaaaaccgaagtgctgtgctcccatttccataagtacataaagaacggaagaagcgttctgtgcgatcataaaaatcccgaaaaagctgagaaattttcccgggctcatatgagaatgtaccggaaaaatctgcgtacggaaaaaggaaggtctgcgccatatgacaaagatcccgagacagagaaagccggagatcagataccagacagctccgtcattaaaatgttcgtcaaccggaaacagccggtacatcgccatcatgatcaaaaaagtgagttggccaaataagatcttgtaaagaaaaatcataccgtttgttttattaaattcacgtcgaatccatcgtttttcaaatttatccataaaatcaccttgtcaaatcaaattattttctacatttgttccttatcatatcatggatttttcttttgaacagcaaattcacagaaagttcttctgatttcctgtaaaaatttacttgaaaataattatcaattatggtagcatcactttgttagttgagactattgaaaaatagatgataaaaacttttggtagaagtgaaaaaaggagagcgtatgagaaaaaacccattgaaaatgttatggctggcagcagcgtttttatgtcttggaatcggagcagtgggagtgatcctgccgattttgccgacaactccattcttgctggtggcatctttttgttttgcaagaggatcggaaagatttcacaagtggtttatggggacgaagctttacaaaaatcatctggacagctttgtaaaggagcgtgccatgacattaaagacaaagctgtgtattctgcttccggcatccgcaatgctgatgtgtgcattttttatgatgagcaatctgccggggcgtatttttattcttctgctgatcctttttaaatatgtatatttctttacaaaaatcaagacgatcagaattgaggcggcttaaatgaaagatataaaaaagagtcagcaagtgcagaacaaacgggaaaaagaaaagcagatcgtggatctgatgatccacctttattgccggaaaaaacataaaactgtggaaaaacatcatggactgtgcgaggagtgtgaaaaactcagagactatgccgcaatgcgtgtggataaatgtccgtttatggagacaaagacattctgcagtaactgcagggtacattgttacaagccgcagatgagagaagaaattcgaaatgtgatgcggtttgccggaccgagaatgttattttatcatccaatcatggcaatccggcacgtgatcacttctgcaaaagaaaaaaagagaatgggaaggaaagaaacatatgattaagacgagactactcaagctgttgaagggctcgggaaaatatatcggagctaatattttctggcagtggatcgcactgctgtttcagatcgcagcagtgtttgcggcaggaaatatgatccagcagctgtttgaaaaaacattggatcagcaggtgatgctgcaaacggcaggaattgtgatcctggcaatctgtgcgcgttttctgtgcgaaaaaggagctgcatatgcctcttatcgggcaagtgcggatgtaaagacggttttaagaaagcagatttatgagaagctgctgcgtttgggagcggcctataaagaaaaggtatctacttccgaggtggttcaggtgtctgcggaaggagtcgagcagctggagatttattatgggagatatcttccgcagctgttctacagtctgcttgcaccgatcacattgtttgcggtattgtcaccgatcagcatcaaggcatgtattgtgcttcttgtatgtgtaccgctgattccgatgtcgatcgtggcagtacagaaattcgcaaagaaactgctgagcaaatactggggaatctatacagaacttggtgacagtttcttagagaacctgcaaggactcacaaccttaaagatttatcaggcagatgagcaaaaagccaaagaaatggacgacgaatcagagcggtttcgtaagatcacgatgaaagtgctcactatgcagcttaattctgtcagtgtgatggatattgtagcatatggcggagcagcaattggaatgattgtgactgtcaaagagtatctggcaggaaatgtatcactcgcaggggcgtttacgattattctgcttgcatctgaatttttcattccactgcgtttgctgggttctttcttccacattgccatgaacggaatgtcggcaagtgacaagatttttaagattctggatatggaagagccaaaacggggagagcacgagattgagggcgaacaaatggacgtcacactgcagcatgtggaattttcctatgagccggagcgaaaggtattacgggatatttcgctgaccataccatccggaaaatttgtctctctggtgggtctgtccggttgtggaaaaagtaccattgcggcacttttgacagggaagaatcgtacattttcgggacagatccagatcaataatgtaccgattcaggaaatcaaagagtccagtctgatggataagatcaccttggtgagacataacagttatctgttcaagggaacggtagaagaaaacctgaaaatggcggatccatctgtgtcgagagaacagatggaagcagcgctcaggcaggtaaatctgtatgagtttttgcaggcacaaaatggattggatacgatgctggaggagcagggaagtaacttttcgggaggacagagacagcgtcttgccatcgccagagcacttcttcatgatacgccgatgtatatttttgatgaggcagcgtccaatattgatgtggaaagtgaggatcagatcatggaagtgatccgggagctggcaaagacgaaaacgattctgtttatctctcaccggcttgcaaatgtggtggcatctgatcagatttatatgttggaaaacggtcagattacagagagcggcacacatggagaacttatgaaaaaagcaggaagctatgcaaatatgtatcagaaacagcaggaattgtgtcaggtaagggagggaagagcatgaagcgaagaagtggaatacagattatgggaaaactgatcggactgatccgtcccctgatgcacgttatggcagcagcgattctgctaggtgtcacaggatatctttgtgcgatctttctcaccgtactggcaggagttggaatcctgcagattatgggaatatggcagggagtttctctgacgacattgtttgtctgccttgcagtgattgcggtactgcgcggaattctgcactatggagagcaggcatgcaaccattatattgcgtttaagctgctggcactgatccgtcacaaagtatttgcggttttgagaaagctctgtcctgcaaaactggacggaagagacaaaggaaatctgatctcgatcatcacaacagatattgagcttctggaagtattttatgcgcatacgatttcgccgatcgcaatcgcattcctgacatccctgatcatggaaattttctttctccgatatcatgtgctgatcggtctgttcgcccttgtgggatatcttgcaattggagttctgatgcccatgtggaattccagacgaggttcagaaaaaggaatggaatttcgtacccgtttcggggatctgaacagcttcgttctgaacagtcttcgcggtctggatgagacgatccagtatggatgcggagaaaaacgggaagagcagatggaacgcaaaagtgtggaactggatgcgaaacagaaagaaatgaagaaactggaaggaacacaaaggggaggaacaaatgtcctgatcctgattttctcttttggaatgctgttccttacaacatggctgcatcagcagggggagatcggatttgacgcagtactgctctgtacgatcctgatgatgagctcttttggaccggttgttgctctgtccagtctgtcaaacaatctgatgcagacactggcaagtggagagcgtgtgttatcccttttggaagaagaaccgcagattgaagaagtatccggtcaggcaaccgcagaatttgcagatatcaattgtgaaaacattgattttgcttatgaagaagaacagattttaaaagactattcgatctcgatttcgaaaggcagccggattggaatccatggaagaagcggttccggaaaatcaacgctgttaaagctgctgatgcgtttttatgatgtacacagcggagtgatccgaatgggagacagaaaactgtccggtatcaatacaaacgagctgcgtgatatggaaagctatgtgacacaggagacgtgtctgttccacgattcaatcgccaacaacattgcgatcgcaaagccgggggcttccagagaagaaatcgtagaggcagcaaaaaaagcatctctgcatgaatttatagaaagccttccaaatggatacgatacgctggtcggagagttgggagataccctttccggaggagaaaaacagaggatcggcgtggcaagagcatttctgcacgatgcaccgcttttgcttctggatgagccgaccagcaatctggattctctgaatgaaagtattatcttaagatctctgaaaaaaatggggaaagacaagactgttattttagtatcccacagagaatcgaccatggctgtggcggaaaaggtatatcagatggaaaacggaaggatttcataagaatccggaaaacagtttcttttttcgtgatggttggctataatagaaacagtgagagtaaaatgaccgtaacgaaaggagaaacatatgagtcagtatgacgtgatcattattggagcaggtccgggaggaatctttgcggcatatgagctggtgaaagatgcaccgcagctgaaaattgcggttctggaagcgggaaatcctctggagaaaagaaaatgtccgattgacggagtgaaggtaaaaagctgtatcaactgcaagacctgtgccatcatgaatggatttggaggcgccggagctttttcggatggaaaatataatattacaaacgattttggcggaacattgtacgagtatatcggaaaagacactgccattgatctgatgcgctatgtggatgagatcaatgtggaatacggtggaaaaggaaccaagatgtattccactgcaggaagcaagttcaaaaagctgtgtctgcagaataaattaaagttgttggaagcatctgtccgtcatctgggaacagatatcaactatgtagtcctggaaaatctgtacgcagaattaaaagataaagtagaattccgtttcaattactatgtggacaagctggagaagacagaaaacggctatatcgtgacacatggagaagaccgtgatgaatgcgagaagtgtattgtttcagtaggaagaagcggaagtaaatggatggaagaagtctgtcgcgacatgaagatcccgacaaaatccaaccgtgtagatcttggtgtccgcgtagaactgccggcagcagtgttctcccatttgacagatgaactgtatgaaagcaagattgtataccgtacagaaaaatttgaggataaagtccgtacattctgcatgaatccatacggaatcgtagtaaatgaaaatacaaacggaatcgtaactgtaaatggacacagctacgaagatacagaaaagcagacagaaaatacaaactttgcactgcttgtggcaaagcatttctcagagccgtttaaagacagcaacggatacggagagagtattgccagactgtccaatatgctgggcggcggtgtgatcgtgcagagattcggtgacctgatccgtggaagacgaagcacccatgacagaattgaggatggatttgtcagaccgacacttgcggcagagccgggagacttaagccttgtgcttccgaaacgaatcctggatggaattatcgagatgatctacgcactggataagatcgctccgggtacagccaatgatgatactttgctttacggtgtggaagtcaagttctataatatggaagtagaactggatgaacatctggagaccatgtacaaaggtctgtacgtgatcggtgacggaagtggagtgacacattctctgtcccatgcatcagcgagtggtgtgtatgtagcgagagagattacaaaaggattgtaaaaagaaaagtgtacgggcattccaaaaagagtgcttgtacactttgttgttaaaaaacaatagaattcctctgcatcttttttgataagtactgcctgatcaggcatagattgcgttgtgacatgcttttgaatatgggggatgtcccgctataatacccaaaagcataagataacttgacagtccagtaaagaattactggattttttgtataaattcttcgatactttttgatgtagctgcaatttttaaccagtttttcagaacagttgcatctgattcctcaaagagtttcttttcaagttctggtggtatagatccaagatcttctaaaaaactgcgtagcatagctctttgaccgttaagttcaccttcttgtaaaccctctctgcgtccggccgcacgctcatctctcaacatctcttctaaaatcatgaaacgttcctccatttcacggctttccttagtaagttcctgtaatgttcgtttcgccatagttatttcctccatcagcagaggaattctataagcaaattatagcaaatgcttcgatgaagtcaaggtgatttgcatcaaaaagaatgttggaattatgtgttttagcagtattgagaaaggaagattcctacggataccagattataagagatgtttctgatctgattgaaatttcagaatccactttgtatcctattttgcgaagattggagatgggtggaaaagtagaatcctataccacacagtacaataatcgattgcgaaaatattttcatctaacagaagagggaagacagtatctgaaaaattttgacaaagacagagcacagttgttaaaaatattggattatattgcagaggaggatgagaaatgaagaaggaacagtttatcaagaatcttcgatacagtctgagaaaattaaaaaaggatgaacgggagaagtatattgcatattatgaagaaataatttcggatatgatcgaaaatggagtttcggaagaagaggcggttgcgcatcagggagggacaaaagaagtcgcagaagaaattttgcgggaaaatgcagttaaacgagagttcaaaattggctggataggttctcttttaattattttgacccttttatcgggaactctgtccggatatctgatgtatcaggaatatcgtataaagtcggaatttgccgaaatccatacagagatcgccaatgagacggtcagtattacaggaggatcggacggtccgacaagtgtatttcttgcgggaaagattacattttgggtacgtcccgatattttgattgtaataacagtaatgatggttataattacaattagttattttgtttgtaaagcgagaaaaataaaatttaaaagataaatatatctgaaaacattgaattttaaattaaaaagagctacaattatactataaagtaagaggaaggagtgtacggttatgacggaagcattgattggaacatgtattttggcaattacgacagtgatatttgtctgggtatgttcagagtatcagatttataacaatgaacattcagcagaggaaaaattaaataccccgcggttgtcgagctggtttgcagcacagaggatgcgcttttggtttgcagttgatgatgcaagagaatatccgcaggaagtgctgaagtcagagaataagacactgcttcaaaatgggcttggaaagcatcatgaaaaacacgagattcgaagcgggaagcgcggagaacatcatacgatacagagtcaaagaacctatcgtatgcggggaaacttataaaagagagattgttttatcacagagaagaggagatgttaaatgcatctccttcatttagtttgtgcgcaagcacgacgattgcgcatggataggcggggattggtgtgaacagtaacaggcgctcatctgattgaaagaaatctcaggaaaaagttcttgcaattcgaaacctatgcacgtataatagattcgtatggagaacgaacggatattgagagttccatgcaaatatttaacgcagcagaagctgcattattgattaagttaaaagcttaaattttataagttggttactttataaccggtgcgtaaacagcacatcaacttgtgaaacggtcaataagagtattaaaagtaaaatatttgctatatagactcgaaaacctttatatctgtagtgcttatacttagaagaaaagacaaagctcctgtacttaagcaggagattggcattatataaagaagcatagcaagcgcaagaaagaatgtagatgtaacgtacgtttttctgcgctttttttatatcacaaacattcagaagtaaaggggaattgacaaaaaagggcgaggtgaaagaaagatgaagaatttatcacaggagaatgctccgatctatgaagcattagagcggttccggcggatgcggatcgtaccgtttgatgttccgggacataagcacggaagaggaaataaagaactggtggaattactgggagaacgctgtgtcagtattgatgtcaattccatgaaaccgctggacaatctgtgtcatccggtttctgttatcaaagatgcagaacagctggcagcagaggcatttcatgcaagtcatgcatttctgatggtagggggaacgacatcctcggtgcaggcgatggtactttcctgctgtaagaagggggataagatcatattaccgagaaatgtacaccgcagtgtgatcaacgcattggtgttatgcggagcgattccgatctatgtcaatccggatgtggagcacagtctgggaatttcacttggtatgaaagtgtctcaggtagaactggcgattcagaagcatccggatgcggtagctgtatttgtgaacaatccgacgtattacggaatttgttctgatttacgttctatcgtaaaaaaagcacacgctcacggcatgaaggttctggtagatgaagcccatggaacacatttttattttggagagaatctgccggtttcagcaatggaggcaggggcagatatggcatctgtgagtatgcacaaatcaggcggaagtctcacacagagttcctttttgcttgtaggtccgtctatgcatgcgggttatgtgagacagatcatcaacctgacgcagaccaccagcggttcctatcttttactgtccagtctggatatttccagaagaaatctggtgttgcgcggcaaggaatcttttgcaagagtggcggcgctggcggattatgcaagagaagagatcaatcggatcggaggatattatgcattttcaaaagagctgatcaatggagacagtatttatgattttgatacaacgaagctgtccatccatacgctggaaattggtcttgcgggaatcgaggtctatgatattctgcgggatgagtatgatattcagatcgaatttggagatatcgggaatattctggcatatctgtctatcggagaccggatccaggagattgagcgtctggtaagtgcactggcagaagtaaagcgcagatatcagaaagacaagacgggtatgctcagccaggaatatattgaaccagaggtcatcatgagtccgcaggattctttctatgcggaaaaagaggcagtgccgatccgggagtcagaaggcagaatctgcagtgagttcgtgatgtgttatccgcctggaattccgattctggcaccgggagagaagatcacaaaagatgtaatcgagtatattctctatgccaaagaaaaggggtgttccatgacgggacctgaagatgcggcaatcgaatatttaaatgttctgatataagggggataaaagtgatggaaatgtggttttcagatgaacacacggacaatgtgaaactgtccatccgtgtggacaagcagctgttcagtgcgcagagcgagtttcagcgaatcgatgttctcgaatcaaaagaatttggtaagattctcgtagcggacggagatctgatgctgacagaaaaagatgaatttatctaccatgagatgatggcgcatgttcctatggcagtacatccgaaggtagagaatgtgctggtcatcggcggaggtgacggcggatgtgtgcgggagcttgcaaaatataataccattcagaagatagacgtcgtagaagtagatcctcttctggttgaagtctgtcggaaatattttccgcagattgcaagcagcctggatgacgatcgcgtgacaatctataatgaagatggactgcggtttgtgcgttccagatccaatgtgtatgatctgatcctgattgattctccaaatccgtttggtcctgcggagggattgtttacaaaggaattttacggcaattgttacaatgccctgcatgaagacgggatcatgatcaaccagcatgaaagtccgttttatacagaagaggcatttcagtgtcagagaatgcacaagagaattatagaatccttcccgatcagtaagatttatcaggcccatattccgtcctatccgtcagggcactggctgttcggatttgcgtctaagaaataccatccgctcaatgacctggatggagtttcctggaatctgcgggggattcatacaaaatattatctgccgagagtgcaccacggagtctttgcattaccggcgtatgtggaggagcttgtaaaagatgttgaataaaaatgtaatgacgttcatcggatgtgatgcggagtataatgaatcagagatcgtgttgttcggtgcaccttttgattccacgacttcctaccgtccgggggcaagatttggaagtcaggcaattcgcaatgagtcttatggactggaaacttacagtccgtatcagggaaaagatctgacagattataagatttttgacagtggagatctggagctgccgatcggagatacggaaaaagtgctggctgagattcaggattgtaccgagattattttaagcagcgggaaaatcccgtttatgatcggcggagagcatctggtgacactgggaagtgtccgtgcagcagcagagaaatatccggatctgcatatcatccactttgatgcacatgcagatttaagagaagattatctgggcgttcaatattctcatgcctgtgtactgagaagatgttgggagcttttgggagatgacaggatctatcagtttggaatccgatccggtgacagagaagagtttcgctgggcaagagaagggcatgtgaagatgcataagttcaatcttgacggactggcagaagtaattgagaaactgcagggaaaaccggtatacatcacactggatctggatgtgctggatccgtctgtatttccgggaacaggaactccggaggcgggcggtgtcacatttgtggaactgatgaatgctgtgatccagacagcacagggagtcaacgtggtcggatgtgatgtgaatgaactgagcccggtttatgatccaagtggagtttccacagcagtagccggaaagattatcagagaatttttacttgcactgcaagtttaatagaagaaaaaacaagaaagaaggagataaaaaaatgggaaaagtattgattgttggatgtggcggagttgcaagtgtagctgtacacaaatgttgtcagaacagtaaagtgtttgatgcgatctgtattgccagccgtacggtttcaaaatgtgaggcattgaaagaaaaactgcaggcttcctacaacggaacgattacaactgcacaggtggatgcagataatccagaagaactgattgcactgatcgaaagggaaaaaccggacgtagtactgaatctggcacttccatatcaggatcttacaattatggatgcctgccttgcgacaggagtggattatgtagacactgcaaattatgagccggaagatactgcaaaattcgaatataaatggcagtgggcataccgtgagaaatttgaaaaagcaggaattacagcgttgttgggaagtggatttgatcccggagtaacaggagtattttctgcatatgcgctgaaacattattttgacgagattaattatatcgatattctggactgcaatggaggagatcacggctatccgtttgcaacgaacttcaatccggagatcaacatccgcgaggtttctgcaaaaggttcttactgggaagacggacactgggtagagacagagccgatggagatcaagagagaatacgattttccggaagtgggaatgaaagatatgtatcttctgcaccatgaagaaatcgaatctctggcactgaatattccgggaatcaaaagaatccgtttctttatgacatttggacagagctatctgacacatctgaaatgtctggaaaatgtaggaatgacatccattaagccgattatgtacgaaggaaaagaaatcgtaccgcttcagtttttgaaagctgttcttccggatccggcatctcttggaccgagaacaaaaggaaagacaaatattggatgtatttttacaggaaagaaagacggaaaagagaagacgatctatatttacaatgtatgcgatcatgaagagtgctataaagaagtgggatcacaggccgttgcctatactacaggcgttccggcaatgatcggtgctatgatgctcatgacaaagacatgggacaaagacggtgtttacaatatcgaagagtttgatccggatccgtttatggatgccctcaatgagtttggacttccatggaaagtggtagaaaaccctcagatggtagattaagaaacggacatcagaaatgaaaagagaagaattaaggactccatgctatgtcatcatggagtcagaaatgaaaaagaatctgcagattttacaggaaatccgacagcagagcggatgtaagatcctgctggcacagaaagcattttctatgtattcctgttatcctctcatcggagagtatctggatggaacgactgccagcggcttgtatgaagcaaagctcgggaaagaatgtatgggcaaagaaaatcatattttttctccggcatatcgggaagatgaatttgaagaggtgctggaaagctgcgaacatctcgtgtttaattcgttttcacagcttgagtgtttcggagaacgtgctgcaaaagccggaaaaagtgtggggatccgtgtaaatccggaatgttccacgcagggagagcatgcgatttatgatccttgtgcaccgggctcccgtcttgggattctggtatccgaatttccggaaacactgccatcttacgtagagggactgcattttcacacactctgtgagcagaatgcagatgctctggaaatcacgttgaaagcagtggaagaaaagttcggcaagtggatgaaacagttaaaatgggtgaattttggcggcggtcatcatattacaagagcggattatgacagagagcttctgatctcctgtgtgcgcaggattcaggacacctacaatgtacaggtctatctggaaccgggagaagcggtggcgttaaatgcgggccatttgatcacaacagtggaagatattgtacataatgatattgcggtactggatgtctctgcagcgtgtcatatgccggatgtgatcgagatgccgtatcgcccgcctctgtttgattctggagaggcgaaggaaaaagaatatacgtatctgcttggcggtccgacctgtctggcaggagatgtgatcggaagttattcttttgatcagccgctgaaagtaggagacagactcacatttggagatatggcgatctatacgactgtaaaaaataatacattcaatggaatgcgtcttccggatattgtgtgggaacgcgaaagtggagaatgtgagatcgtgaaatcgttcggatatgaagattttaaatgcagattataagatcttcaataagtgaataaaataacaggaaagtcaacaaaataacgattgttgactttcttttttcgtgtgataaattgttattgtgcataaaaatacaaatcatctatccggataacagatcgtaaagtaaggagttgtaataacaatgggactgcatgtcattgatgaagcaaaaagatgtttaaactgtaaaaaaccgagatgtcaggaagggtgtccgatccataccccgattcctgtgatgatccagatgctgctgcaaggagagatgccggaggcggcagaaatggtgtttgccaacaatccgctgtctgtcatctgttctctggtctgtgaccacgaaaaacagtgtgaagggcattgtgtgaaaggcataaaaggagaaccggtgcatatttcttcgattgaaaattatatttcagatacctgctttgaccggatgaagctggagcagcttccgaaaaacggcaaacggatcgcagttgtcggcgcgggtccggcaggaatcacaatcgctattttgatggcgtgcagaggatataaagtgacgatttttgaggtaaaagagaagatcggaggaatcatgcgttatggaattcctgaatttcgtctgccaaagtccattttagaccgctattatgtaaaaatgaaagagctgggtatcttatttaggcccaattttgcgctgggtggttccacaggtgtggaagatcttttaagagacggatatcatgccgtatttatcggaacaggaacctggagaccgtatcagctgcatataccgggagaaacatttggaaatgtgcactacggaatcaattatctgaacaatccggatgtctatgatctgggagaacgggtacttgtcatcggtgcggggaatgcggcaatggatgtggcaagaacggcaattcgtaaaggctcccggcatgtaaccgtctattccatcacagaaattccggcggcatccccaaaagaggtggagtatgcaaaactggacggagtagagttcgaatatctgcagacggccattgaaatccgggatgaaggagccattatctgtgatgtggaatggaccgaagatggaaaactggtgaaaaaagaagagactgccaggcttgttccggctgacagtatcattatttcgatttctcagggaccgcaggatcggatcgtgaaccgggataaagagctgcaggtagatgatcggggattgctcaagacagatgcaaatggagagaccaccatgccggggattttcgcatccggagatgtagtgaccggtgcaaagaccgtggtagaggcggtgaagtattcgaaaatgatcgcagatgcgatggatgaatatgtaaaaacacattatgaatagaaatacaggctggtgttctttgcaaaacatcagcctgtacttttttactctaaaacaaaatccatataaaccggattatgatcactccatttaaaaccggtatccagaaccagtgcatcttctacagtcacattatcagataccagaaaaccatctactgttacaacaaaatcagattcgctgtaaggctgatctgcgtttcggcaggacggtaccggatttttctcatcaaacggtgcgatcaactgtatgaaatcaggaatcagttcttcggatatcggttttgcccagttgtcttctaattccttgtgaccaaaaatctcagcagaatttccaagcagatctttgttaaaatcaccgcccgcaacaatataatttccagcgtcatattcttttttcatatcctcaaacagcatccgcagctgattgtcggcggtgctcggatcagatgtataagcggaaagatgcagattgtacaggacaagtttctttccgttttctgttggaatccggttgacgttatagcagcgatccagatccagcagcttcataaatccatcctcgatcggtaaagagcgtctgatggattccgtgatctccatattagaaattgtaagcataccggatttgttctttccgtgtggctccagaatcgggtagaacagataagggctgtcatagttctgagcaaatgtgtaatttcgtgaggtgttatcggttgaaagtgtctgtgaaagcaataatttgcgttcatccacatgataacttcttgttccgtcaatatccacttcctggaacagcataaaatccgggtttaattgagctacagcttctgcatagctgctgacattttcaatgacggcatctttggaacgggcacggctttcttttccaccgtccataaagaaagaatagtcgtcactgtatgcgccgaaaccgatatttccagatgtgatgcggtaactttttctggtttttgccttttctgtagattttccggtgatcgtcagtttttgcttgtcttccagacgatagtaactggaaaatacataaacaacatagccgactacgatcagtatcagagttccgaggaagattcccaggcgtttcaaccatttttttgaatttgttttcataaatatatggtccttctttctgtatcatttttttgaacaacatttcgcaaaatgattatatcatatcccgactgaaatgaaagaaattgtcaaaaataaaattgccgatcgtgcgaaaaggaatcaaagatgaattgagaaggcgatacggcagtgttataattgagaaatatgaacatccgaagaaaggagctaatgtgtaaaagatatggagaaaaatagaatgttttcaaagttaacagaggcacaaaaacaattttttgaaaccggacggactcgtgatcttgcatttcgtatctgccagttacaactgctggcagatgcaatgcgaaaaaatgaaacggttttggaggaggcattaaagaaagatcttggaaaatctgcatttgaatcttatgccacagagattggatttgtacttgctgatattcgatatacgattcaaaatcttcagaaatggtcggctccaaaacgtgtaagaacaccgctgtatttatttccgggcaaaagtaagattcaaaaagaaccttatggaagtgtgcttattctgggaccatataattatccggtacagttgttggcagagcctctgatcggagcgattgcggcaggaaactgtgcagtactcaaaccatcagaacttaccccacatgtttcaaaagcaatgtatcagatcgtacactctacctttaaagaagaatatattgcctgtgtggaaggtggagtagaggtcaatcaggaattactttctcagaaatttgattatatcttttttacaggaagtgaacgtgtcggaaggatcgttatgaaagcggcagcagaaaatctgacgccggtgacattggagttaggtggaaaaagtccggttattatcgaaaaaactgcaaatataaaagaggcggcaagaagaattgcgtggggaaaactcatgaatgcgggacagacctgtgtggcgccggattatgtgcttgtggatgagagcagaaaacagcagttcttaacagagatgaaaacagcattttctcatctatatggaaaagaaatcaaggaaaatccggattttggacgaattgtaaataaacagcacatggagcgtctgcagaacattctggatcaagacagagattatttgttttatggaggaacaacggattttacacaacgctatgtcgagccgacgattctggatgtgggaaaactggaaaattccgccagttcagccgctatgcaggaagaaatatttggtccgatcctgcctgttttgtcatatcacagattagaagatgcgattcgttttgtgaataaaagagagaaaccacttgcgctgtatgtgttcacccgaaagaaaagtgcggaaaaatttatcctggaacgggtggcttctggaggagtgtgcgtgaatgatacgatcagtcatctgatcaatccgatgctaccgttcggaggagtgggagcatccggtatgggacggtatcatgggaagtacagttttgacacatttacacatgaaaaaagcgtgtttataaaaccggcaaactggaatcttccggtttgttatccgcaatttacaaaaggaaagaaaaaacttgtaaaattctttttgaaataatgaaaaaatcaccttgactttgacgctgcgtcaacttgtatactaaaatccggcaggaggtaaaaagatggaatacagtattcgggaatggcagaaatgacaggggtgagtacacgtacactgcgttatttatgatgaagaagtgtcaggatgtgcagagtttttgaaggctgctgttttgtattgggcgaaataaaggacaagatatgagcagcatgatatcgtaagtaaaaacaaaagtg

SEQ ID NO: 551 - DNA, 76667 bp, Ruminococcus gnavus
  source 1..76667: mol_type = genomic DNA
actagcccgctcaacgtctctaaattatacgtctgctggatcatgactctgcttttcatcgtaatctttttgcggattgccagaaatactgccatggtacatgcgatcacgcccagccctccgatctggatcagcaaaagtagtatgatcttgccaaatactgtaaactgtactgccggaacgaccgtcaccaggccggttacacacactgcagacacggatacaaacagcgcatccagatatgcgatcggctcctgattgctaatgggaagatacagcagaatactgccaagaaaaatcactcccaaaaacccaaatgcaatgatctgcatggtgctgaatgttactttttttcttttttcctgaattttgttgtacaaattatgccagtctgtcttcatctctattttataccttaaaccggtatcctaccccccatattgtctcaatatattgcggatgagatgtatcatactcgattttttcacggatctttttaatatgcaccgtcacagtcgcaatgtctcctacggattccatatcccagatttcccggaataattcttcttttgtatatacatggttcggatgtcctgcaaggaatgtcaaaagatcaaactcttttgtcgtaaaggaacgctcttctccattgacccatactcgtcttgcggttgtgtcgatcttcagtccacggatctcgatcacatcgttttcttccacattgcttccgatcagacgctcatatcttgataagtgggccttcactctcgccaccaattcactcggactaaatggttttgtcatataatcatccgctcccagtccaagtccccggattttgtcaatatcatccttctttgcagaaaccataatgatcggcgtattcttctgactgcgtacctcacggcagatttcaaatccatctacccccggcagcatcagatccagaatgatcagatcaaattcccctttcaatgctttattcagtcctgtctctccgtcatttgccacttctacctgaaatccgctcaactccagatagtcccgctctaaatctgcaatactttcctcatcttctacaatcaatattcgtttactcattcattggtacctcctgatattttctgattacaaagtacatggttgtcccgacgccctcttcactggtagcccagatctttccgccatgctcttctacaatttttttcacgatcgaaagcccgatcccgcttccgcctttggaagaattccgtgacgcatctgtccggtaaaaccggtcaaatatattcggaagatctttcgccgcaatcccttttccgttgtctcccagttcaatctgaacaaaatctcctacatcctttaaatccatggtaatggaaggatctgacttatccatatattttacagaattccctacaatattgctgatcactcttcgaagctgctccggatccacaatcaccttagaatctgtctccagataatttctataccgaaactgtacgccctttgcctccagttccataaacaaatcctctgcacagtcaccaaaatactgctttgctgagatcgtcgtaaaattatacggaatacggttcgtatcgatcttggaatagaatgtcagttcattgatcagaagatccatttcattcgccttattgtagatggtcttgatatatctgtccatcttctccggagtgtctgcaactccatccataattccttccacataacctttgatagccgtgatcggtgtcttcagatcatgggaaatattactgatcaattctttgttctctttatcgtatgccaccttttcttctgcgtttgccttcagtctcaaacgcatctcttcaaaatcctgacagagctgtccgatttcatcattggtctcattcttaatttcaaaatccagattgccctctttgatattgcgggccgctgcctgcagttttgcaagcggcagtgaaaccgtcctgtaaatccagaagatcagagctgatgccgtgcaaaatacaatgatcagatataattcctgaatatcattcaccgcttttggcgcaaatgccgtcatcgctacagttgtaaacaatgtaggcagaatcatcacgatcataaacgcaagaatcagcttggtttttaatttcatcttcatcgcctcccatcctgcatgctctaatacagaaaagaggacagtccctggtgcaggtccctgtccttcttttttattttccgcacctctttcgtattactataaaccaaaagaggcattccgtctactgttataaatattttttcaatacttctgctttgtccagtttttcccacggaagattcagatcgtttcttccaaagtgtccgtaagaagaagtctgtttgtagatcggacgtcttaaatccagcattttgatgattcctgccggacgaagatcaaagttctcacgcacgatctccaccagtttttcttcggatacttttcctgttccgaatgtatctaccataatggaagtcggctgagcaacaccgatcgcataagaaagctgaatttcgcacttgtcagccagtcctgctgccacaatgttctttgctgcataacgtgctgcatatgccgcagaacggtctacctttgtacagtcttttccggagaatgccccgccgccgtgacgtgccattccaccgtaagtatctacaataatctttcttcctgtcagtccactgtctccgtgtggtcctccgatcacgaaacgtccggtcggattgataaagaattttgtatgctcatctaccatctccgccggaatgatctcatcaaatacatattttttgatgtcttcatggatctgctcctgtgtcacatccgggtcatgctgtgtggaaagtaccactgcatccaaacgttttggagttccgttttcatcatattctacggttacctgagtctttccgtccgggcgaagataagacagcgttccgtccttgcgcacttttgtcagctgaagggcaagtttgtgtgccattgcgatcggatacggcataaattctgctgtttcgttggatgcatatccaaacatcataccctgatctcctgctccgattgcttccagttcattatcggacattttattttcttttgcttccagcgccttgtccactccaagcgcaatatctgccgactgctcatcgatcgttgtcagcacgctgcatgtatctgcatcaaatccgaattttcctctcgtatatccgatctcacgtacagtatctcttacgattctcggaatatccacgtacgcttttgttgtgatttctcccatgaccatgaccataccggttgtcacgcaagtctcacatgcaacacggctcattggatcctgctccatcaaagcatccaggatcgcgtctgaaatcgcatcacaaaccttatccgggtgtccttcggtaacagattccgatgtaaataataatttttccattttgttcctccttctttgtttctttctctcttttcggactgcatctcttctaattaaaaacagcccgccaaaaagcggactgttctttaccaaaacaatcctcttattgttcgattgctcgctcaggttggcaccttccttgacggggttgccgcagcttcataggtcctttgtacctccactgctctgaataagagaaagttttcatattcatttttgtgacaatagaactctacaccgtattaccagaaatgtcaatatggaattctattttttctctgtaacgactccattttcatcaatcgatgcattcgggcacagagctgcaactgcatcatacatcttcttctgtgtctctgcagaatccagatattctgtcatatcttctgtctggattcccggaacgagcgacatctcttttaacccttctgatgtgatgttgagctttaatactgccgaatatctgcttgttccgtctgtcagcacagatcctatgctgtacacaaccggttttccatcgatatactcaattccctgcagacgatcagaatgtccgccaatcacgatatccgctcctgcctgcaaaaatgcagctgcatgctctttctggtaggattccacaccattggcatccccttttccttcatgatcatacacaatcagataatcgcactttgtggcagcctcctggattacttttgtatactgctctgcctctgtatattctaaaatccccgctttgccgtcacctgccgccatatcataagaatcttccatgccggaagctgatgtaaatccaatcttgattccattgatgatcaaatacgccggctgcgcagcatctgcggcatctgttcctgctcctacatatgccattcctgcattttttaacagctccatgttctcttttaaggcatcttgtccataacctgccgcatgctcatttccaagagacacaatatctgctcccaatgcttccaatatattcatacgttctgcattggcatgcaggatcgaagtctttcctgataatgccgcccctttactgctgatgctgaattcctgattcaaaaagagtgcatccgctcctgtcatcgcacttaaaatctgctctgagagcatctggcttaaatctccagtctcatcgtatttgcccagtgtataaccttcttctgtcagtgtcaggtttcctgctatcgcgatctccgcctgtccgtccttcgcgccgtctttctgatagatatgatttgcagctgctgtctcatcatcttttaagtaccctttatactcatcagacagcacatgcagcgtctttccatagctgctataaaaatcctctgcggatacttttcctgatttcatggctttttgaagctttccggaagattcatccggatatgtcttctggatccatgctgcaaagtcctctgcttctttttttacgtcttccgcagacgcatccggatctgcctcagaagcaaatgtctcatagcttgcactgatcgcaccggcaagtccgctgcccgatgtcttcgttgtatcttttggctcgcttttcttaccttttatcgtgaaaaacactgccgcagctgcaactgcgatcaccaccagagcgatcacaaggatcataacctgcttttgcacctgctttttgcgctctgctttcttctgttcccttaccgcttcatcgtatcgttcactgctcattttctcttttgaacctccctgtgatttatcaaaagatgcagaactcaccgtcctgcatcttcgctcccccgttatatatcagcctactttcagcttaaatttctgaatctctttctcatcagaaaccttttcaatgattccgccaagaccgcgcagcttttcttcaaatctctcgtatcctctctggatatagacgatatcatccacaatagtgattccgtctgtcgcaagccctgcgatacaaagcgccgcacctgctcttaaatccggcgcactgactctcgctcctgaaaacttctctacaccttcgatggttgcagagttgccctctactttgatcactgcacccattcttgccagctcatccagatacttaaatctgttctcaaaaatactctctgtgatcgtacttgtaccctgcgcgagcgcaagcactaccccgatctgcggctgcatgtctgtcggatatcccggatacggcaatgtcttcacctgtgtgcttctcaagcggttcttcgccaccactcttaccgcatcatcaaactcttctacttcacatccgatgtccacaagcttggagattgtcgcatccagatgtttcggaatgacatttaataccgtcacatctccctttgtcgctgctgcagcaaacataaaagtacctgcttcaatctgatccggaatgatggaatattctgtcttatggaggctcttgactccacggatcttgatcacatctgttccggcaccgcggatgtttgctcccatgctgtttaagaagttcgcaacatctacgacatgaggctccttggcaacattctccatgatcgtaagaccgtccgccatggctgctgccatcatcacgttgatcgttgctcctacagataccacatcaaaatacagatgtgttcctctcagatgctctgcttctgccacgatcttgccatgctcaatatccacatccgcacccaatgcgcggaatcccttcagatgctgatcgatcggtctgcttccgatattgcatccgcccggcagagccacttctgctctcttgtactttccaagcatcgcacccaaaagatagtaagatgctctgatcttcttgatataatcatattctatattaaagtctgtaattgcgcttccgttaatcttaactgtgtgtctgtcaactctctgaaccattgctccgattccctgaatcgcttccagtaacacattgatatcatttacatccggcagattgtcaatcagaacggtctcgtctgtcatgatcgctgccgcgagaatagccagtgccgcatttttagctccgccgatttcaacttcccctaccagcggattgccgcctttgataatatactgctccatattgcacctcgattatcgataattctatcgtagtcccttgttaaatttcattactcccgccttataaaagcaaaaagaaacgataattcgcctttttaccctataatacgattagttattataccataaaatttcaatttgtaaaatcattttttctccagcgcctcgatctgcgtcaaaactgcatcgatcgtttcctcgatctgacagccgtcctcgcatatcgtaaggtctgcatattgttcaaaaagttttgtccgttcttcatacaaatcccggaaagtctgcccttctctgagcactactccccgctttttcggactgcggatcctctcttttattgtgcgataggaagccttcaaatatacgactgttcctatttctttaaaatgtttcatcgcctcttcgcagtatacaacacttcctcccggagagattacagcgcgctcggcattcacctgacaattcacctgattctcaatggcaagaaatccatcttcccccacatctgctataatctctctgagcagacgtccctcttgcttctgaatcaataaatctgtatcgataaattccattcccagccgttttgcgacaaccactccgaccgtactctttccaactgccggcattcctataaaaatcagattcttcatacgtattttcacccttatttttccataatcatgttaacttttatcccaaaatcttcgtgtctacatcgtttttatcatagcacaaaatctgcaattagtaaattctgtggcgagacctgcgatgatcacttcttcttttatatagttcatgatacagcataacttcaatcagattctgaagccagttcggcatacgtcttctttccggttcccgccgattctgttcctgcacctgcataaattcaggttcccattcagattccggctcctgcatccgctctgcctcttccatctgcatgacactgttttcttctgcctgcgacagaagtccttcatattctgttccatagaaaattttttcatgttttcttacattttcacagactcttttgcacatcagatgcagctgcagacggtcaggatattcatcatacatcatgctgttgtcatattccatcctgtcacattcttcctctatatacgggagcagccgttttgccacatccggataaagactcttcatgtactcataatctctacgctctttgcgctcatcatcatactgaagaggcagaggatacgccatgtaatacggtaattttttattcatagatccacacttccgtttcagacattatatgactaatatatgtgatttttgagatatggtgattttccttaaaatatgttagactaatataaagcatattttttctaacattcattttatttcataaaaatgacgtgaaatatcttattcatttcaaaaacaagcaaacgcactgtatcgctccgtcatggaattgatcgtgcgggccaacaaacagaagtttgaggaggtaaaaggaatgtgtgatgcactgcgggaattgatgaaagatgagattgatgcggaagtaaaaaaacaggtacaggaaaaaatcaatgcagaggtagaatcagccgtagaaattacaaaaaaagaaagcaccaaagcaacagaaaaacgcatcaacgctctgattattgcactgtccaaggctgaccgaatggaggatatcataaaggcggccaaagaccatgactctcagcagaatttatttaaagaattcggactgtaactaattctgactatgaaattcccagacatacgagagtcaactatgtctgggaatttttagcaaaatcagatggagtaaaaccagtttctctcttaaatgcttttgaaaaataactttgactggcaaatccaagattctctgcaacaacagatacctgcccaccatcctgcaataatttttttgctacattaatttttaactttaacaaatatttgtgcacgcttatccctgcatatttatcaaatattcttttcaaactggcgtcactgatattacagtattctgcaatttcacttaccgttggctggcagtcgagattcgtatttaaaaaattgatcgcattacgaaacgtgatcgcatccggaacagaagaaacagaggataatgttccccgctccgcgagactcaaaaataattggcaaaggtaacttacaataatttgagaataatatggaaatctggaaaaaggatgtaaataataatactctattttttctgtttctatattaattaaatcaactttattctgcatatatacaagtaaagaatctataatttgtgtctgctcctgagaaagtttaaacactttattgcgaagccaaaaagttaatggaccacctgccgaaaaagaaaaagtaagcacggtagctcctttcggattgttcacgataaatttatgaaactctaatggtttgtgaaaaataagttcaccctgcgacatattatagatacgttcgtcagcagaaacgcagagctccccgtctaaaatatacaagcattcccagaaatcgtgcgtctcacctggaaattcaaaaccacactcataatgaattttaaacaaagaatgcatactggttatatgaatttgttcgataatcggaattgccggaaattcatttttgatcaacatacagctcctcccccatttatgatgttactgttcacacccaatccccacctatccacgcgcaatcgtcgtgcttgcgcactccagtaccgcacttcgtgctagattgcttatgtatgggcggtgactggttccaccagatgttaaatatagattcttttccttacatgcaggcatgacggttcagaacctatatttaacacctggtgtgaacagtaacattatgatctaaaattacatatttttggacttttattgcatagatttgctctttttatatgtgtataataacactaacaaagagtcctgtaaataagaaggagaatgaacatggacaaagttttaaaagtaattttgatcggtgcaggaaacaggggcgaaacatataccgatattatgactcagatgagtgacaaattcaaagttattgcagttgcagaacccatcgagagccgtagaaataatatccagaaaaaacatcagatagccgataatctgtgctttgaagattggaagccattacttgatcttggaaagatcgcggatgttgctgttatttcaacgatggacaaacaacatctggaaccgacactgaaagcaatttctttgcaatatgatattttattggaaaaaccagtatccccggacccggaggaatgcaataaaattgcagattatgcggaacaaatgggaagtaaagtcattgtttgtcacgtacttcgatatacaccattttttattacaatcaaagaactgatcaatgacggaagactgggagatattatttctgttaatcatgaagaatgtgttggaaatgtacatcaaagccacagttttgtcagaggaaattgggggaactctaaaagaccttcctgtatgctgttgcaaaaatcctgccatgatatggatattctgcaatggttaattggaaagaagtgtaaaaaagtacaatcttttggcaccttatcctattttaaagaggaaaatgctccaaaagatgcaccggactattgtattcagggatgtccgaaagcagacacctgcccatataatgctgtcagactttatctggacgataaggaaaatgactggtttcgaacaacctcaaccagagaagcaaatcccactgatgaaatggtggaaacagcacttcgtacaacacaatatggaaaatgtgtattcaaatgtgataacgatgttgtagaccatcagactgtcaatatgatttttgaagatgatatcactgttacctttactatgaatgccttcaacaaaggcggcagatttatacatattatgggaacaaaaggggaattgcacgcagcaatggacgggctcggaactcctattacaatatatgaattcgaaacaaagcagactacagaaattccgattgttgccaaagatggcattacgaatgggcatggcggcggcgatgatggaattgtgtactctctttatgagtatctgactggggaatatcaaggcttctctgtttctgacatccgaacatccgtaaataatcacctgatcgtgtttgcagccgaggaatcaagagcaaacggaaccgttgtagatttcgacacttttgtagagaatctgcgttaattttcacaaatctatcaaatcaatgataattatatggaggaatatattatgaaaaaaccagtattagtcattatggccgcaggaatgggaagccgttatggaggattaaaacaaattgacccaatcgatgatcagggacatatcatcatggatttttccatttttgatgccaaaagagcaggatttgaaaaagtcgtttttattatcaaaaaagaaaatgagaaagattttaaagaagtaatcggaaatcgtatggcagacgtcatggacgtagaatacgtgttccaggacttgacgaatcttccggaagggtttgaagttccagacggaagaataaaaccatggggaaccgcacatgccgttctcagctgtattgatgttgtagatggtccttttgctgtgatcaatgcggatgattactatggaagagatgcattccagacaatttatcatttcctgtcaacacagaaagatgatgataaataccgttttacaatggtaggatatcatttaaaaaatacattgacagaaaacggtcatgtcgcacggggcgtttgtactgtggatgaaaatggatatttagtagaagttaccgaacgcactcatattgaaaaaaagggagagcgggccgcttttacagaggatgatggagcctcctggacagagcttccaatggatgctgtcgtttctatgaatatgtggggattctcagaaggatttcttcaggaaatcaaagcaggatttgctgcatttctgaaagaaggtttagaacataatccattaaaatgtgaatatttcctcccaaccgtagtaagtaatttattaaaagaaaatcgggcaaccgtgtctgtgcttacctcaaaagataaatggtacggtgtgacatacaaggatgataaacaggttgtcgtaaatgcaattcagactatgaaagacgacggtatctatccggaaaaagtctggtgcggggaaacggaagcattgctcaatttccagttaaacgcaatggtaatgaaggcagtacgttacggaagcggacatatcaacgatacctttttggtcacattaaaaagagaagagggaaccgaaggccgtgtaatcttacagcgcatgaataaaaatatttttaaaaacccggaagagttaatggaaaatattttaggagtgacatcatttctccgtaaaaaaatcattgaaaacggaggtgatcctgaacgagaaacattaaacgtgattccgaccaaagacggaaactcatattttgtggattccgagggtgaatactggagatgttataattttattgaaggtgctacaagttacgaccaggtagaaagtgaggaagacttttatcaaagcgcagtctcttttggtaatttccaaagattactggccgattatccggcagaaacccttcatgaaacgatcaaaggattccatgatacaaaagcccgctttaaaacatttaaaaaagctgtaaacgaagatatttgcggacgtgcacattctgttcaggatgaaattcagtttgtttttgctcatgaagatctcgcaaatgcatttggagatatgcttgaaaacaaagaattgccacttcgtgtaacgcataatgatacaaaattaaataacattatgatcgataacgaaacccacaaaggaatctgtgtgattgacctggataccgttatgccgggacttgccatgaatgattttggagattctatccgtttcggtgcaagtacaggcgcagaagatgaaactgacctcgataaaatccagtgtgatatgaacttatttgatatttacgcaaaaggatttattgaaggctgtgccggaaaattaacaacaaaagaaattgaattgctgcctcttggagccaaagtaatgacctttgagtgtggcatgagatttttaacagattatctgcagggagatacctattttaagattcatcgggaaaaccataacttagacagatgccgcacacagtttaagctggtatctgacatggaagcaaaatgggataccatgaatgccatcattcaaaaatataaaaaaacgcactaatacaaaaaggggggctggtcacctgaaccgcccctcttgctttcttacggattctattcctgcatcttctctttataatgatgcgcatcctccagcatcatatctttcaccttcatcagacggatttgagtgcttcgttcattctcatctaacttcatggtaatatatttgatgttctcttctgcctccggaataatcacatgttccagcgcgttgacacgtcgccttgtcttttcaatctctgctgccatcaactggcatgccttctcacattctgccagccggatcatgtccggcaggatatctgccagagactttactgctccatccagatcactggatgtaaatgcaaatccatatgaataaatgtcattttcatccgcagttctcgtttgatatgcaaatgtcggaatgttgacactcatgatattcttttccccaggtgtcagtgtgatcccctgctttggtgccatcaatgcagtattcaatgccgcctcagacatccccgctttggcaatgacaaaatttttatttgctgcgagaatcccggcttccacttttttacgcacttccatgttttcccgcaccagatccagatactgacgcatcagctcatcccgcttgtcttttaaaagcttatgtccgcggattgccgtgatccgcttttttttcagacgggtcaattccatacgggtaggatttacctgttttgatgccatcgtttctcacctctctttccgggcataacatttatgcctgataatactgatccaaaaacttgtcgtcgatacgcttcaactcggttcttggcagcatggaaaggagtttccatccgatattcaacgtctcttcaatgcttcgatccgtattgtatccctgagaaacatattctttttcaaatgcatctgcaaattttgcatacatcaggtcaatctcagtcagcgccgcctctcccagaatcaccatcagctcttttgcatcttttcctcgtgcataagctgcaaacaactgattcatggtattggaatgatcagctctggtcttgccctctccgattcctttgtctttcagacgggaaagggacggcagtacatcgattggaggtgtcacaccttttcggtacagctccctgctcaaaataatctgtccttctgtaatatatccggtcaggtcagggattggatgggtcttgtcatcctccggcatggtcaggatcgggatcatcgtgatacttccctttttgccgttctgacgccccgcacgctcatacatcgtggcaaggtctgtgtacatatatcccggatatccgcgtcgtcccggcacttcttttcgtgccgcagacacttcacgcagcgcatccgcatagttggtgatatctgtcaggatgaccagaacatgcatatctttttcaaatgccagatattccgcagccgtcagcgccattttcggcgttgcgattcgctcaatggccgggtcatttgccaggtttacaaacaaaaccgttctgtcaatggctccggtctccttaaagctctccacaaagaagttggactcttcgaaagtaattcccatcgcagcaaatacaaccgcaaatttttcatccgttcccagtacttttgcctgtcttgcaatctgggcagccagttttgcatggggcagtccggatgctgaaaagatcggcagtttctgtccacgtaccagtgtatttaatccatcaatcgcagagactccggtctggataaattcctccggatagcttctcgcagctggattcatcggaagtccgttgatatccatccgtgcctgcggcagaatctgtggtccattgtcgatggggcggcccagtccgtcaaatacacggcccaacatatcctcagatacaccaagctccatgcttcgtcctaagaatctgaccttactgttggacaggttgattcctgtggagctttcaaacaactgcaccaatgcatcgtttccattgatctccagcactttacagcgccttgtctccccacttgcaagctcaatttctcccagttcatcataagttacattttctacaccgcgcaccagcatcaaaggtccggctacttcctgtatggttctgtactcttttggcatttagaagccctccttcccctgtgcagcggaaatttccgcatccagttcctgatttactttctcatattctgtatccagatcgtcctcgtgcacatatttaaaacgtccaatctgctctctgaccggcatattgatcagatcctgcagagatgcaccgcctgaaagtgcctccactgccttctcataaaatgccatgaccagcttcatcatcatatgctgttttttcagcgaagtatacgtatcgatctcatggaaagagttctgatgcaggaaatcttcacggatggatctggccgcttccattttcagccggtcacccggtgaaagagcatccatacctaccatttttacgatttcttccagttctgcctcttcctgaagcagtgtcatcatcttctggcggccttccatccagtcagatgctacatttgcattgaaccaggtctccatatcatccagatacaatgaatagctgttcagccagttgatcgccgggaaatggcgtttgtaagccagtgcagaatccagtccccagaacacctttacgatacgaagggttgcctgagataccggctcagagatatctccgcccggaggagaaactgcgccgattacagaaagtgcaccttctctgccttcttttccaagggagatcacatgcccggctctctcataaaattgtgccagacggcttcccaaatatgccggatatccttcttcacccggcatctcctccagacgtccggacatctcacgaagggcctctgcccagcgggacgtagaatctgccatcaatgctacggaatatcccatatctcggaaatattctgcaattgtgatacctgtataaatagacgcttcacgggctgccaccggcatatcggatgtatttgcgatcaaaactgttctctgcatcagagactgtccggtcttgggatccttcagttccggaaattcatttaaaacatctgtcatctcatttccacgctctccgcatccgatatacaccacaatatctgcctctgcccattttgcaagctgatgctggatcactgtctttccacttccaaacgggcccggtactgctgccacaccgcccttcgcgatcgggaagaaggtatcaatgacacgctgcccggttacaagcggcatcttcggcggaagctttctctgatacggacgccctttgcggaccggccatttctgcatcagggtaagctctctgtcccccgtatcagtggcaacaacggcaaccacttcctcaaccgtaaattctcctgctttgatctctttgaccgtcccttttactccataaggaaccatgatcttctgctgtaccacaggcgtctcctggaccgtaccgatcacatctccttcttcgacttcatctccgactttaacagtcggaacaaactcccatttcagatttcgtttcagagacggaacttccacaccccgcttcagactgttgcctgaaattttcatgatatcatccagcggtctctggattccatcgtaaatgctggtaatcagccccggtccgagttctacggacattggcacttccatggattccaccggctctcccggtccgagtccggatgtctcctcatatacctgaatagacgcctcatctccgtgcatctctataatttcaccgatcagtctctgcttacttacacgcacgacatcaaacatattcgcatcgtgcattccagaggcaatgaccagcggtcctgctacttttttaattacgcctttactcattgccgaatctacctcccattattcttgtgagaacaggatatccgaaccgactgcctgctccacggtttttttcacgccttctacacctgctcctgtattgccggatacacccggtatctgaatgatggcaggcatgacctgttctttatatcgctcgatctcttccggcagttctgccaccagagcctctgtaatgtagataatcccgcactccagggccagctggcgcagtttttctttcccttcttcggcatctctgacagggcagatcgaaagacccagtgtctggaagccgtaaatgctgtcataatctccgattactgctatcttatccatacatctccctgatcctttcccgaattgcctcctccggaaattgattctgttttccggtcagaatgattcgaacggtcttgatctcattttcccgcgccacaatatatgccaccagcggtcccacagaaaatgcctgatatttctgcggtctcatggtttcgatcatccggttgtcacaccaccgctcaaatgcggacggtgactctgccaatgcttctgccccacctgcataggcagttgtgagcagataatcccggatcgcatccatgccgtttgcagctgcttttgccaaaagctccacctgaactgtatcgcagggtgccagagcacgctttaaaaactcctggctttttcctgttttctgagaacggactgcaatcttgatatctgcgattgctaccgcagactctgcataatcacggatgatcgcatcctctgcgtttcttccggtctcagaaatcgctttcagcgctgcccgatccacgatcacatcacacaactgtccgtcaccggtatgaagcaacacgtcatacgcttcctgagctgcctctgacattgccggcggaagacgccagaattctttattctttacaatctccagcatctgcgccccgggaatggaacaatcattgtaaaaaacattccgatcctctgtccctgtacatactactttgattgctgcttttacattgtgaaacacttttgtgtaggacatcacatcaaaaacagacaaatccggagcgatatccgagatcacttcccagattttctcctcttcccgctgcagcatcttcaccggatcgtgtgcatccgccggatctccccatcccttctcgctcaaaagctgaaggcactgtgtttcgttctgacacgccatcagctgttcaatgacactttgtgtcaacagagaaccctcctgcgcccgtatgcgcgcaaccgcgtaggtatattccaattcattcaagacgaatccctccttctcgctttcttttgctgcctgcaaaaaacggctgcgctctatacaaataatattttctgtacaacatccgacaattcatcctgctttgtgtggaacattgccctgatcgtacaattttcttcaatcccgccataaaccagcacaaatccgccgtccatatccttcggttctttcgaaaccacaagatgaccgccttttttctgtgccgtctgttcaatcacgtcctcaaatttctgcggcatacgcgcaagatccgcagcagaaaaatagattgttccctcctgcggaagtgcatatgtttccagcagcttctgaagcatctcaaagtatgattccggttccaaatgcagtacctgctgatatgccttgttaagaacctcctgtatcacttcctgttttgcctgcagaagagcctgctttctctgcatttcactggaagatgcaatgcgctgtgcatagtcttttgtctcgtcttccgactttttagccatgactgcgctctgttcctccatctgctctcttgcttctcttaaaatctcttccgcctttgtcctggctttcgagatctgttcttccgctgagtgattcgcttcgtccagaatctgacgtttcatattctctaatccactcatccttcatgctctcctttttcgttcactttggctcactcatttacacctgaattccgctgacagccaggaaagagatcagaagtgcaaggattgcataagtctctaccatcgccggaaacagcattgctttaccaaactgctccggtctttttgcaatgatcccgatcgatgctgcggctgtctttccctgcgatcttccggaaatcagacctacaattccgatcggaaggcaggctgccaaaatcagaagtccggttgtcacatccacctctgcaagtcctccgccaagaattccgattttagacaatgtgataaatccaatcagaagaccatagagtccctgtgtaccaggaagaagctgtaagatcaatactttcgcgaatttacctggatcctccgttacaacacctgctgctgcctgacctgcgattccaactccgatcgcagagcctgcacctgcgagaagtactgcgattgccgcaccacaaagtgcatacacgattcctaaattttccataatgctcataactaagattcctccttaacatctacatattttgtatccggggcgaacggatgaaatgctcttccgcctccctcgtaaaattttccgaaaaactccacaaactgcagacgattcgtgtgtacatatgctcccagcagattgattgccagattcagcgtatgcccgattacaaaaataacgagaaacaaaatcacgcctgcaatattgtttggcagcatgctgcccatctgattgatcaccgatgcgattactcctgttgccagtcccagcgccagcagacgggaataggacagcacatcactgagccatccggtaatgttgtacagatcataagcaccaagcgcaagacgcagcgctggatttttcttgtccctgccggacatcagcaaaattcccaccgcacccgcgatcgccagtccctttgccaccaggttcactgcatccggaaatacgatctgtatctgcgagatcgatgaaaaaatctcactcggaagcagcatcaggatcagcccgatcaaaagcataaaccaaagtaccacatcacagaagaaatccaggatcttcttctctttcaggcacatatatcctttgatgccaagtcccacaaacaaatggatcataccaaacagcatcgaatacatcaaaagcttcatcgggtcattcaatggaatgaaccaaagagccggcaccgttatcgttgttccgaaaaacttctgggatacaatatctacaatattcccaaaatatccgccaaacagaattccccagatcagtgtggaaattccgcagtacataaacatcttgatcgattgatacattccccggctcatccgcgggaatttttttaataatacgaaacacgccactgcaatgatggcgccatacgccgcatcagaaagcatcattccgaagaaaaatacataaaagaatgacataatcgtcgtcgggtcaaattctcctctcttcggaagtccataggactccacaattccttccatacttgcggaaaatgaattgttgcttaaaagcgttggcgattcttcatcctctttgatttcttcaatatcaatgacacacgtaaacgccttcgtcagactctcttcaatgcgtcctgtatcttttgccggagcatatcctgtaatgaaaaatgcccgttctgactgcggcagctttccgagcacttcgtatttttctgcccgcaccctgtaatcatctgcaagaatccggatatttttacgctcaccggcaaatgaccgtacctctttttcaatttccagaatgcgctctttgcactcccgacatgtttgttccagctccgccttcactgccgcaggctctttgtcccatatctgggacggtcttgcaaatccacggcttctcaatacttcttccagcttttctgcatcctgtgtaagacaaacaaccgccagatacacggtatccttatccgaatggataaccgacacatccacaccatctacttccggtgcatcctgtgcgagcatctgatagatctcttccagcgtggcaagcggcatggttccgatcagcatcactgtatgtgccgtaccgccataattcatcggtacatgaagatccatccacggagtcagactttccatactgttctccagctttaggataccggctttttgttctgccttttctttatccagcgcaaggatcctcttgactgtacataaaagttgttccttctgatccaccactttttgataatcatctgcttcgatcagcgctttcccttccagtgcagaaaacatcgacttcttctccggcgcataccgatccagaatttccagtgcctgatctgaaagtgaagcgctcttttctaattccattcgctcctgtctcgtatccatcgttgtaaaatcaggatcctcctccagaatctggctgatctccatcaccttcatcctctgaagcttttccagaactgcttttcgatcttttttcagggcgcagatactgattttttgcatctgcagtaccgccatagtgcactccctccttttttaatttcttttcacaacactaactgagaaatcactgcactcactgcctccgcttctttctggacagcaaactcctttaacaccttgatttctttctctgtctgcacacgggcctcttcctgaaataccctggctttttctctggcatcctgcatcgcatcctgtgcagaaatccggtgtgtttcttcctgggatttgatcatacgttctgcctcttgtctggcatcttccagaatcttctggcttttttccccagcttcttttacaatcacatctgccgctgcttcggtttcacggattgctttgattgtttcttccaccatcgattcttcaccaccttcctttacttccccattacaatgcaactattctatgcattgcgcatgaacttaatgtcattataccgcaaaatgtaataatgtcaaaatataaatccatatcattctatttttctgttaatttcgaaatcttcataaaatatgctgttttcttctcgtgctgcaaactgcacacatctacattagtattcacaaaaaacaggacaggcattctccaaataaaaagaatgtctgtcctgttttttatctgtccatttccagttccggtcctacatgcttgtgatttcgaatgattgcatccatctctcttttactgcaggatggaagatctcctttgatcgtattcttcactgctcctgccgcattcccatactccaatgctttctgacagtcaaaatcatacgcaagaagtccgtataacgcccccgatacatacgcatctccgcttccaatccggtctacgacttcaatgttgcgatatggctcctcttcgtaatagcaatcctctttcgcactgtagattactgaaccgaacgtatgctttttcggactgtgtacgattctctgtgtagaagccaccacagagatcggatattcctgtgtgaagctcttcatgatacgcttcgcatcgccttcttttaagaatgtcagccttgcggtctcttctgagcagaaaaagatatccacatacggaagaatctcttcaatacatgctttcgcctccggtcctgtccagagatttccacggaaattcacatcaaacgaaatcagtgtaccgttttccttaaatcgtttgatcatctcgatggcagtacggcggatattttcactcaatgccagtgtgatcccgcttgtgtggaaacatctggtgctctggaacatctcctttggcagttcttccagactgatcttgtcaaaagaagtgtgtcttctgtcatacaccactcccggctttctcggataagcaccattctcatagtagtaaatcccgagacgggcatcctgactgtcatcatataccagaaaatcatcgcttactccgcagaaacgtaccttatcttttgcatagattccgagtgcattgtccggcagcttggagacaacgcctgtgcgaagccccagaatcgaaactcccgacacgacattgagctctgcaccgccaacctgcttctggaatgtctccccactgacgatcctttcattatccggcggggataatctcaacaaaatctcacctaatgataataaatcaaatctgttgtttcccatcttgattcctcctgacattctttcctatcgattttagtttcatattgtaaaactagtttttatattgtggaactgtttatttgaattatactacaacaagcaagagatgtccagatttacattgaaaaaaatgatcttactgcatcattgcatataagaccatttttcctgattttctctatttcattctattgctgttcccagctcagctcatgcagatgtccttccagattcatatgcgcaaaattctgctggcgaagtgcttcatacaaaataatggaaactgaatttccaagatttaaagaccggatgtctcccaccatgggaatccgcacgcagtcctctttgtggttcacaagaatctcttccggaatgccggcgctctcttttccaaacatgatatagcagtccggctcatactgtacttccgtatagactttcggagcctttgttgtcgccatgtagatttttgctcccggattcttctccagaaaatcctcaaaattgatatacgttcttacatccagatctgcccagtaatccatccccgcacgctttaatgctttctcattgagacgaaatcccagcggctcgatcagatgcagtctggtattcgtagcaacacaggttcttccgatatttcctgtatttgccgggatctccggctcatgtaacacgatatttaacatgatgctttatcctcatttctcagtttttcaataaagcgctccagtcttcccagcgccaccttcagatcttccagagaatatgcataggaaatacgcaagaatccctctccacactctccaaatgcagttcccggcaccaccgcaactttttcttccatcaaaaagcgggttgcaaattcttccgaagtcatgccgaattcactgatattcgggaacacgtaaaaagctccgaacggctcaaaacactccagtcccattcttttgaattcatgcatcaggaaacgccttctctgattgtaggattttctcatttcctctacttcatctccgcagtggcgcagtccctcgatcgctgcatactgactgtttgtcggcgcacacataatggcatactgatgcagctttaccatctgctcaatgatcagctttggtccgcagcaatatcccagacgccatcctgtcatggcaaagcctttggaaaatccgttgatcacgatcgttctctccctcatccctggcagagctgcaattgaaacgtgatctccctgataacttaattccgaatagatctcatcggagagcacgtacaggtcatgctctttgataaactctgccaccggctccagatctgcttttgtcatgatcgatccggttggattgttcggaaacggcatcaccaggacttttgtcttcggcgtcactgcttttttcagatcctccactgtcagcttaaattcattttcatactgaagcggaatgatcaccggcacaccatccgccataatcgtacatggaagatacgatacataactcggctgcggaatcagaacctcatctcccggatccagcatacagcgaagtgccacatcaatggcctcacttccgccgactgtcaccatggtctcttgcatcggatcataagatactccgattttccgctccagatagctgcagatctcttctcttagttctttcaatcctgcattggatgtataaaatgtacgtcccttttccagagaaaaaatgccttcctcacggattctccacggcgtatcaaaatccggttctccaacacccagagaaatcgcatccttcatctcatttgccacgtcaaaaaatttacggatgccggacggctggatctctacgatcttttttgataatggatttctcattacggtgtcaccagcatcctttctgactcactttttgaagaaaggatcgttccgtggtctttatatttcttcaaaataaaatgagtcgctgtactgatcactgaatccagagtagaaagtttttctgaaacaaactgcgacacttcttttaaagtctttccttccagagaaaccagaagatcatagccgccggagatcagatacactgcatgtacctccggatagttgcagatgcgctctgcaatcttgtcaaatccctgacttctctgcggtgtcatacgcacttcgatcaacgctgtcaccagttctactcctgctttgtcccagtcgatcagcgtgtgatatccacagattactttgtctttctccatctctgcaatctcattggcaactgtcacctcatctgttccaagcagtactgccagttctccaagattggctctgctgtttttctctatatagtataaaatttcttttcggatcaattctcgcttttccatcgtttttattctccttattctgatcttacctctttttgtgcctgctcttcccaccagcgcatcaattcatccggagcaggtctgtccagataacgcacttcgtctccgcttgtgattacttttgcatgatctgccgttgtaaccccaagcacactggctcgtgccccactctcttccagacaccgcacaagagcattgccgtctctggtaaccatcagaaccgttcctgcggaagtcatctgatacggattcaggtgataatattcacagacttccacacattcctgccgaattgaaatccgggacatttcaatctgcattcccacatttgccgcctctgtcagttcccagagagacgccaggattccaccgcttccaatctgctgcattgcagtcaccagtggttccccttttggtgtattttcctgcttcacactgcgaagcgcatggaaaacctccagttctgattctatcccctggatctgacgcataaatgccggaacaaaccgctttgaaagctcttctctcttctcatcgaaaatacgcagtacgccttctgctgcgatcgaaccacaaagtacgatttcctgattcggctccgcctgagcaagcgtacgcagctgtcctttttccacacttcctgccgcagtcaccgataccacggactggctcactgcaggactggtctctgcctttgcacatgttattgcaatcccccaggatgcacaccgctcttccatacagcggaacatctcttttaaccgcgactcataagcatatgttggcagaatcacctgtaccgaaacaccaattgccgaagccccccttgtctccagatccaacacggcacgcatgatcgcatataccccgatatttttggaatttccagaaactacagccgaagcaaagaccacatcttctgtgtccctaatctgtaccgcagtacacatctcttccaccgaaaggtctgtcagaatctcttttctttttgtatgcagttgtttcagtacagaacgttttaaaactgtctgtgatacatttccaactttcatcgtttccgtctcccttaaccctctatgttcctgttcgcaacagccacttttctataccagatatggcaggatcatcgttgcgatcatcgcaacgaccagtaccagcgctccgatcgcaatcactcttttgactcttttatcattaaaatccactgttttcacctctttaaattctcatacccaatgggtattttaggttacattttaaactctttgcagtatttttgcaagaagcactgctcacattttggacttcttgccgtacaaatcgaccgtccgaaagtaatgatctgaatattatataagatccaatgatcttttggcagttctttcatcagatccatttcaatcttttccggatcttcgttttttgtcaggccaaggcgtctggatatccgttttacatgtgtatctaccaccacactcggatcatgatagatgtttccccggatcacattggcagtctttctcccaacacccgcaagagaggtcagatcttccagactcctcggcacctcgcctccaaatttatacagcagatctctggtacaggcaatgatatttttcgccttattgtggtagaatccagtcggcttgatatcctgttccagctcttttaaatccgcattggcaaacttctccagtgtatcatatttctgaaacagatctgccgtcacaatatttactcttgcatccgtacactgtgcactcagcatggttgcgatcagaagctgccacggtgtctcataattcagataacagacgtactcccgtccatactgctcatccagaatcgctaaaatttcttttgtccgttttttcatacatgatcagacgaagtctgcccgccgcaggcatgtgttggatgcccggatgggtatgcctcgtctcctccttctacccaaaatacgcttgcctgattcgtcagaacattccggttccggtaatcaaacacgtagagatttccattgatctgctccagatgcgtcattttccgaagctgtctcttatcatatccttcatagcccttcaaataccggcgctcttctgcctctttttcataaaatgcagaagctttttgcttatcaacgctgacttcacctgcaaactccggtctttttttcacattttcccgtaaatagagatccagtatcaacatctgccgatagttttccacattcttttctacacatgctttgataaatgcaaataatacttcatatcttgtaattcgggagtgatttatcatatgcagtccgttttcttcataataacggctcagactttcatacaaagcaaacgtatctgtaaactcttcctctaataatcgcagtgtattgacaaactgtccgctgttgtaatagacctccaccatctcttccacacctttgagacggatcacgtcatcataggagagccactttgtagaaagcacttcaaacggcggccgatcctgatataaaagctgataatcttccgtcttttcatgcatataggaaccttttaacaccttcaggaatccaagctggagctgctccggatgcaatgcatagacatcacggaaggactgtgcaaaacgctcataatcttcatacggcaacccggcgatcaggtcgagatgctgatgtacgtttcctttttcctgcactctttttacaatccgctttacttcttcaaagttcatctttctgcggatttccgtgatcgtctccggattggtggactggattccgatctccagctggatcagccccggacgcatggacgcgatcagctccatctcctcttcatttaacagatctgctgccacctcaaaatggaaattcgtctttcctctgtcatgctcttttaagtatgtccagattgccatggaatgactgtgcttacaattgaaggtgcggtctacaaacttcacttgcggcacttcgtgatcaatgaaaaactgaagctcctttttgaccagttccagattccgaaaacggagacatttatcaatcgaggagagacaatagctgcaggaaaacggacatccgcgactggattcataataaatgatcttattctgaaaatcctcaatgtgatcatacacaaacggcactttactcagatccatgaccgggcgcggcgggttctgccggcaggttccattctcccggtatacgatacccttgatcgtatccagactttccctctcctgattccaatattccatcagttccagaaaggtctcttctccttccccgcacatgacacctgtcacctgtggatattgctccgtcacagaaactgcattgtaagacacttccggcccgccaagccagatctgcatctttggcagcactttgtgaatctctgtgatcagctgctccacatataaaatattccataaatagcaggacagacatagaatatccggttttttcctgtaaatatcagacaaaatatcatccatcgtctggttaatggtatattctgcaatctctgtctgctgtgcatactttcccgcataagcacgcagactgtataccgccagattggaatgtatatattttgcattgatcgctgtcagtaaaactttcataaaaacctccatatccgttgacattttaataaaaaccatgtaaaattatgaaccgtgcagccggggtgttagcggtaccttgtacctgcaatccgctatagcaggggtgatattacgcagagggtgcagcattgcatagctgccctcggaaagtggcgttgagatttgggtcctacgcgacgggaatctgtgaaccgtgtcaggtcgggaacgaagcagcactaagcagaacctctcgggtgccgtaggggtgcctgggttgagttaactaccgaggtaacgtatggggtgatgcattcgaagcgtaatgcacgaatgattttccgcaaaaacaggaagtttgagttattcagacttcttttttttatctttttgtttctgacgcagttccttaaaaaactgtttcatcatcccactgcactcttcttccagaactcccgttgtcagttccacctgatgattgaactctttcatatccagaagattcaggattgaacccgcacaacccgccttgggattcatacacccgactaccacccgtttgatccgcgcctgcacgattgctccggaacacatctggcacggttccagtgtcacatacatggtgcagtcttccaatcgccagtcatccatttttttgcttgctttgcggatcgcctgcagctccgcgtgagccagtgtgttcttatccactgtccttctgttatatccgcgtccgatgatcttatcctgatacacgatcacacagccaatgggaacctcctccagaacgtatgccttttttgcctgacggatcgcttcccgcatatatttttcatcctgattcataatgtttcctcttttcaatttctctctgccctgatccggttcttttttcccacacattgaatacattagaagaaagacaagacctgaggtattatatgacacccggcatctattatttctatgaatatcaagcggataaaaaaatccgaaatgtaggctttttaaaactgacgcagacttttcagtcctgtcatctccagatctccatccggcagattcctgctgcatcacaggaaaaactacctctgtccatgttctttttcgagaaagacaaaccccggaaaaaaactgtggcagaacttcccacacaaaatcagtgtgtatcctgtcgtgtcacactttcagaagctgactttccaccgaatctgacattagcgaagctccatggttttcttctgcaaaccgcagacggcagatatttcgccgcttctacaggcaaccggccattttctgtaaaccttctgactgactggatggaacccgccccctgcccggagccagacccggaaccagaatctataccggctccagaacctgaacccccatctgtccttgcagaagaaaaaatgtgcgaaccgccagaagaaaccgcacatccttgcgaaccgacttcccgtatacgcaaactcagttatgaggatctctcctccctgcaaaaaccattctggcggcttgccaacaacagctttctgctgcatggataccacaactaccatcatcttcttttactggaagaagacgaacaccagtggcttggtgttcccggtatttattctccccgtgaagcacatgctgccgagttattcggatttcctcagtttacgagagaataccatcaaaaactgacgctctccgaagacgaatgcagcacggataaagacttcggctactggtgccgctgtcttaaataatcccgttcatatcctgatacaggcgctttgcatagctgtctgtcatcccacagacatagtctgtcaccagaagcaggcggagatacagcttctctgcctcgctctttccttctgcctgataactgtaagcctttttatagttatctgaaataaatgacaatacccggctgtcaatggcatttaactccctgtcggtatcatagtacagcacagcctggatcatacggtccatcaaaaagtccaggatcactgcttctttgacttccatccggtaaatttctctggaggagaatacataccggtatgcgatattgccgagacattccatcagcttttctccaaaggtaccgcgaaagaggtctctttgaaacgtccctgccatgatgtcttcatagtggtccataaatccttttgtcgcacagtcgatcagaaatccctgcgcgcgaatgatccagttcttgatggcataagcctccggattttgaacacccttttcctgacctctctgatacagttctttcagctttaaaactccgtcaaacccggaatcgggatattgctcattcagacatacgagttcttctttaaacgcatgatacgacagaaatccttttacaaatgcatcttcgatatctgccgtcttataagccagatcatccgcagcctcaagaatataggtcagaggatgacggcagttccctgtcttcgtctcctgcgtgatctcctcaaatatcttctcatctgccagaaaatatcccatcttcttttctctgatattcccggaatccggatggacctgtgtggacgaaaccggatattttataatcgtattgagcagtgcataggtcagattcatcccgtactcatccaccagataatgaagtctcgttaccagtcggagtgcctgtgcatttccctcaaaatgatagaagtcctctttcatctgcggactcaatatcatatccagagtctgtctcttataatgcagttcgggaagcttccgcaaaaaccagtcccggatcgccagctccccgaaatgcccgaacggcggattgccgatatcatggatcagcccggcacattccagaatatgagaaatatcctccttcatcttccgggtaaacttttgatccgctccacgctccaggattgcttcaccgatattctgtcccagcgacttggcaagagaagacacttccagagaatgcgtcagtcttgtccgtacaaaatcactctgatccagaggaaatacctgcgtcttatcctgcagtctccgaaatgacgcacttcctatgatccgatgataatccttttcaaactcactgcggaaatccgattttttcgcatgctgtttctttccggatccccgcatccgcttttcagataataaggtcttccactccatagacagcctccttttaatccagataaaccggcggcacatactcccttccaagcatcgctttctttctctcctgctctccaagaaatgcccactctgtcatatctttccacttatgagtccttctgtcgtatacctgaacatatccgatccggctcggatgcattctgacactgttggactgatactcatgacctgtatatggattgatatcacccacagacagatcttctcgttttgcatcctcttcttccgcccgcttcatcacggaagaaatcggaatatcctttgcgatctcctcgatggtacgctcctgattctcttcttcctcatgtggctttaactcttccagcgggagttctatctgcatctcttcaagtgtcggctctccatcctctaattttccttcttttctgcgcatctcttctacggtacgcagatccgcaggcgtcagttcagcagattctccgcctaaaatactcagctgaaacggacagtctaagatcgacgcgatcatccgcatatcctgctcctgaaaattgtctcttcccagtctctgcgtcagattctgtctggacattttcattccggtcttttcttctataatctccgcaagttcctttatggtcatgccttttcggctcaatactaccttgacctgttctccaaatgtaagatcttccatgctcttcctccttctcggatttttacatcagacaggaaatatttttatttcccgtcacccaacttctctcattgtagcaaatcccattttatgcgtcaatcgcaaagactgtttttccgctatagaaagaaaagagtttctatcccggcttgcgaaataaaaactcttcctgtttatttttgtatctgtgccagatattcttccagcgtaattccttttttcatgatcgcctttgcagcctcttctcccacatagcggtaatgccacggctcataaatatactgggttatatctgtcttatccttcggataacgcagaataaatccataattctgacaattcttcatcagccactgctgctcttgcgtctgtgcctgtgtctcatccagtgtctggttcgactcagatgtgatatccagtgcaagacccgttgcatgttcacttgttcccggaactgccacagactttttcgtctcatcgtaagaatctaaatacgaatatccctgactgagccatgactgcatggtatcattgaacacattcttctgatcatcatacgaacggtatgctgaaatgatcttcagattcatccccgctgttttcgcatcctgaagcattttatttacagactctacaatccgggagtctactttatgatcttcatcatctacagccgtcaattccggtgaatagtctgctgcaagcggataagaactgttcaccaggagcagattccattcatttgactgcagatttacttctttttgctcattctttgcttccttcagctgcttcttcaaagatttcgcttctttttcatactttgccttgacagttttgatctcatcatttttgtcatgcatcttactgtttgctgccagaaatgtgagcaaaatccctgctgccgctccaaggatcatccctatgatcagtatttttttcgcttttcgatttactcttgccatatttcttttaactccatttgtattctagaatctaactctgaatcgttcgaacagactgcgattcgataaggaaatccttccagagggtactcacaataataatatgtctcttcaaactcctccggcttttttatcagcctgggtggattcgaaagcagtatctcaaacgatgacatcttcagtgccattccctttctggtcgctttcatgaaactttcttttagtacccagtatctgcagaacttttccgctcttgcctcttttgaatcacatctgaaaatatcttcatattcactgcggcaaaaaaaacgttttgctaactccattctggccttttggactttctcaatatcacatccaagctgtacgccctctcttgcatcagtgtcgatcgagcacagcacataatccccggaatgcgaaagattgtaaactgcccggtcggaaattttgtaccgctttctgatctcctccaataaaagccatgcccctgcactctgagccctgtctttctgaaacaacagcttccttgctttctcttgtcgaaacgcaggaagtgctgcaaaatatttctgataacattcctcctcatacagtgctctgatatctgcaagccaggtacgtatcatactcttatcctttcaggtaacggacttcaaatgtatcaatcgtgatcggcttgttaaacaggcttccctgtacacagctgcagccaagttctttcaatacattcagctggtctcttgtctccacaccacttgctgaaaccggtactcccagctgacagcaggcatctgttactgcttttgccacactctggcttcggccgttgcctacaatattggtcacgatacttttatctatcttcaatccgtcaaattccatgatcgtcagaatcgctactgtggattcttttgctccgaagtggtccaaaatcacccgcacattgctctttcgaatcttattactcgtctctgcaagcatctcctgattcatatcactgtaagactctgaaacttctacttccagatactcacaggacacatgatacttctcgatcagagctgtcattttttctgctacatctatctgtctgagcgttgctcccgcaaaatttacagcgatcgggatcatcggcaaatcttccgtctcccatctgcgcagcgtcttacatactacttcaaacacatacagatccagataatgagacagcttggtctcttccaggagtgtcagatattttcctggattcataatacccagatctttgtggtgatagcgcaccactgcttctgctccgactacttcctccgtatcgacatccactttcggaaccagacagacaataaaattgccattctctatatcgctgagcagatcctgtttgatgataggctcatgatgcccttttttcaaattcttataatacttctgcttctcttcacgcatcataccttctgcgcggccgatcagcttttctgcatcaatatccactttctcccaggcataaccgacagagaccagtccaagactgatattatcaagtttatgatgagcgtcgttcacacttttgataaatgtatcatatgtcgcatcctctaccgctaccagatactcatctccggtcattcggaacaccagagagctgcggaaatgctcctccagcacttcacccacacggattacaacctcatccccatattcatgtccaaattcccggttaaagttcttcaatccattgatgtccacagatactgctcccagtgacttgtgctcttttttctgtacgtccgacatatatctgacaaagctgtttctgttcatcaaaccagtcagatcatcatgataactcagatattcctgctgcttctgcatcttctgcaaaagaatagactgtgaaatatatggaaggagagacctcataaaagaaatctcacatccgcctctgtgtacccctaccgctgcaagaactgccgtaattccgtcttccaatggctgagaaacactgtagtctgcttctgtcgtatccgtgatatcctgtcggatccaccgcggccactgctctttatcaagcatcttgatcttatcccgctgccacggcacaaattcagcacaccactcatagattgtaagaatctcctcttcatctctctcgatataatacacatattctgaatcgtagtaatcgcgtatcgtaccgagcacgtcattcataatctccaggatcgaacgctgtttataattctcactcatagtttctttcccccgatatcatcctgctccgttggatataaaatttaagaatactccatttcttgctcatccacggaaacacatatagttattttataataatatcttttaaaatgcaagaaattgtgagtttgtgaaaaagatacaaaaaaatgaccatacaaagaaagtgggagcctgttctctgcatgatcattttggcaatattttggttttattttgattttcgtgctatttgatatagcttacatgtttgcagatttcgtgaattgctttctcttttctttcattgaaaacaactttattttcttcaaacaaatttcgtccgtctgtatcgatcgatacgatcagaggtccaaattcttttacgcggcaatgccataaggtttccggcattcccagatctctccactgtgcatctacaatttcttccacttccgcggcagctaccactgcatttccggcagggaacacacagtggatcgccttatagtttttacatgcatactctgtgtttggacccatgcctccttttccgatgatcactttcacaccggtctgttccacaaattctttttcgaatttctccatacgcatactggttgtgggaccaacagataccatttcaaacttgtcatccgcaagaggccggatgatcggtcctgcatgaaagattgcagcgtcttttacatttacgggaagctctctgccaccctcaacaagccgtctgtgtgccacatcacgacaggttgtcatacttccgttcagataaataatatctccgatatggatatctgccagatcctcagcagatatcggtgttgttaaaattttctttccatctttgatttccaacattataaagtcacccccgaatgtgttgtgatcgtgtaattgagatccttatcaaaaataatgtgtccacgtctgtgagaccagcagccaacattcacggcgacaccgattgtagatggatgtctggctgtgttttcaatatgtacccccattacggaatacttgccgcccattccctgcggtccgagtccgattgcattgatcccgtcttcaagcagcgtttccatctctgccgcgcgctcattctcattatggcttcccagcggtctcatcaatgcctttttggaaagcagtgctgctgtctcaacagatgttgccacacccacaccgaccagaagcggaggacatgcattcaggccataagaggtcatgacatccattacaaattttgtaactccttcgtatccctctcccggcatcagcaccatggctttccccggaagtgtgcatccgccgcctgccatgtaagtataaatctcgcaccgatcactgtctggtacaatatcccagaatactgtcggtgttccttttccgacatttttgcctgtattgtactcgtcaaatgtttccacgctgttatggcgaagcggtgcttccactgtcgattttataacagcttcttttaaaagtgtctccaattccccaatcaacggaaaattcgttccacattttacccagaactgtaatacacccgtatcctgacagcttggtctgttcaattcttttgccagtacctgatttttcttcattgtctcatagatgacttttgaaagcggactgtcctctttttctgccagttcatccaactttgcaataatatcatccggcagcacttttgcgatatatgacacaaaatttgccatataatccgtaagctgctctacttgttctttcttactcatgtttctgcctcctttgattttttacatctataatcagatgctgtttattttcacaattatcatcatccttttatggaaagaatggaaatgcaatcggaaggatgatcatactcacaaccgttgctatgataatcaatggaaatcctgcttttacaaaatccataaagcgataaccgccgactcccacaaccatggtatttgccggcattccgatcggggttacataagcacaggaacctccgatcacacatgccatcaatactgctctcggatctgctccgattctctgtgcaatagataagcagattggaaccagcaacgctgtggttgccgtatttgacataaaattagtcattacacagcacagcaaaaatacaaccagtgtcaaaagatatggtgatggatccgcgccaagcgcgccaattactttttctgcgatcatctctcccgctccggtcttctgaagtgccgctgcaagagataaggtacccccaaacaggaaaattgttttcagatcaatggattttaacgcatctctttcagagatcactccgctcagaatcagcagcaatgctccgattcctccggaaatacacaaatcaatccctatctgctcttcaaaaatcatggccagcaaagtcagcaccagaatgatcagtgacatccactgtttccattttggcacttgatcaaaatctttttttgtatcgaatgtctcctcttctttcggatcacattccggaagtagtttatatcctatggttgcataaaataaaattcctgcaatcaggatcggcatccctacaatggcatattcgaagaaaccgaatttcaaatttattttttcaagagcactctgtgcgatcatattgcctggtgccccgatcagggaaagattccctcccatggctgccgcaaacacaagcggcatcagtaattttgatcttttgtaccctgattttgctgcaattccgataacaaccgggatcaatactgctgcagtgcctgtattggaaagcaccccgctcatcaaacctacgatcaccataatcgcaacgatcagcatacgttctgttttggcaaaccgggttacaatgcctccaatcttgtttgccattccggtttcaaataatgctcctcctacaatgaacattgctacaaacagaatcacattgctgtcaataaatcccgcaaatgcagtctgcacatccagcacgcctgtaacagtcaatccaatacagacgatcattgaagtcaccccaagtggtatcttttcaagaacaaacataactaccgcaaacaggagaaacaaaagtgttattgttgacggactcatttgttttcctccaatccatttttctattcacatcacagcgctgtctgctatggtttcattatagaaattgtatggatagttgtacatttacttaaaatgataccgctataaaaaaagattatgatactctgcatatttaagcatttccgacaaaaattatggtataattatgagaagcaaagactgctgttttgatgattttgaacaaaatcatagtaagaaaaaaatctttgatattttagaaaacaagaaagaaatggggaaactgccaatgaagatcattcagttagaatacttttgtgccgtctgtcgctaccacagtatcacacaggctgcacagaaactctatgtcacacagcccgcgatttcgaacgcaatcagagaactggaaaaagaattttccgtcagcctgttcagccggacaaagaaccatatcgttctgacaaaagaaggagaagcattttatcagaaagccagtgtacttctggacaatattcatgagacaacttcaaagctttacgatctcggaaagcaggttgcaccgattcgcatcggtattccgccgcttttgagcactgtctttttcccggatatgctgaccggcttttacaaaaaatatcctgatactccagtcgaactttttgaatacggatctgtccgtgcggcaaatctggtactcgaagatactctggatctggcacttgtcaatctcaacttttatgaaaccaacaaactgaattcctgtcagcttctttctgaccagcttgtattctgtgtttccagggatcatccactggtaaaagaaaaaagtgtatcgatcgaaatgttaaaagatgaaccattgatcatgtacaatacagattctgttcaaaatcaggctctgctctcaatttttgactcgatcaaagtaaaacctcatgtaatcttaaatgccagccagctttacaccattcaggcttttgtccagaaaaatctgggcggagctatcctctactcctcgctcctcaaaaatatgcacggaatcaaggggatccctatcacgccgacaatcacacaggaaatcggactcgtatggcaaaaaggcagatatctgaacagcagcaccgaaaaatttatcacctttacaaaggactttatgcaattgtgatcccttctgagcagacgatcacctgtgtcctgatcgatccggatgaaaagatgctctgcatttttcataattcgcctaagatatagaggggtcagtttttgcctgaccccttcacaaaacagccgtgttttattccttccaatatttctctacaatctcctcagccttttccaccgcacaggaaaatttcttctgaacccgttctatgatctcttctttcgaaaatcctacctcctgatatgcctccacagctccctgttcaattccatcctgatacaaatcttctaatgctttacacatatccacctgctcctctctcttttctttttcaaatgcttgttttaatattgtttcagaatgcagaaattctcgaagtacctgataagtctcttcatccacatgccgaaagtattgttctttactttttacgtaatgcagcaatttttctttatcctgcctacattgtaacattccgaaaatctcctgtaaatccgtatgaaaacgctccaattcctttacatttcccgcatcgatcaaattgatccgatagttggatatatattttttcagaatctcgttcttatcctcatcctcactccatcttaaaatcccataaagatcctgacttccatcccaaacgtccgggtgataataaaacaccagagtgatcaccggaaccaacctgtcttccttccgaaaccgcgacaaaaattcagcttccgcgactttttgtttttctgccgcttccagacacttccaggactgtcgaatctgctcaacataagacaggctgtcatacaacatatttctcacagtcatggcataatgtacattctcttgattttcacacgccaacagtaccagatatgccccctgctcccatcgcataatgatatcccgatatcgttgaacctcctttgctttttcatttttatcagatacaagaatatcggtctctcccgttgccggatgcaaatcctccggcaatatcacttgctttccctgaaatacaatcccgttaaacaaatctgcaaaccgcctgggatttccaagccattgctttactgcagcatttccttttcccatactgcactcctccttcttcttttcttttttcatcaaaattgaatattcggcgaaactgcctttgaatttgaaccgtttagaaacgatgttccagacatttgaattgtcacacagacaacgtctgagaatttgatgtgttttcattatactacttaaatttcttttttcaagtatattttcaccaaaacagcctgtcccatatccacattcttctcaatatgtacacaagacaggctgtcctcctatttcatttttttgattttcttaatcaccttaaaaattcattgacagatacttacaagccgccaatgccgccacacttccgtctgccgccgctgttgtcagctggcgcacttctttggtccggcagtccccggctgcaaagattcccggatgagatgtcatacagtcctcagatgccagaataaatccattttcatccaggcgtaccagaccgtcaaagatttcattctgcggaatctgtccgatcgccacaaatactcccgataccggaatgtggaaatcctgcccggtctttttattacgcaggaacaatctttctaccatgaattttccttcaatatctttgacaatggaatccaaaacaaattctacattgtctttttctttcaatacgtctaccagattactctctccacggaattcgtcccggcgatgtacaacataaactttattgcagtagttggaaagaaactctgcatcctgcagagccgtatttcctccaccgatcaccgctacatctttcccgcggaaaaatgcaccgtcacaggttgcacagtaagaaactccggatcctgccagtgcttcctcctgtgggatccccagatgtctgtgagatactcctgttgcaatcacgactgttttacatggatattctttctggtctgtcacgatgattttgatcccgtcttcctcacgtacttcttttacacgctcggaagcagtctctgctcccagcttcatcgcctgattcagcagattcatagaatactgacttccgctgatactctccaatcccggataattctctactttcggtgaatttacaatctgtcctccaaaattcagtccttcgatcaccagagtccgttttcctgcacgctgtccatagatagctgctgtcagacctgctgtcccccctccgataattccaatatcatacatatcgagttcctccgttttctatttttctatcgtttttctgcaaatgcccggatattggacgcatttgcaagtttctgtacaccttcttctttgatcacgatcagtgtcggcgcctgcatgacgccatattttctaaccagctcttcattctctcccgcatcaactacttcataagaaatattcgctttttccagggaatcttttgcaagcttacagttcggacaggtcttcgttgtaaaaagaagtacttttccttcctctgtattcacctcttcgaaaatacgctgttcttcttcctgttctgtctccctgaaagtctcctgcttcacatgagagtgttctacatcatacacttttcgctctttaaattcctgtagtttcccgtcattccagtttttaaccggacgataatatcctgtaatcctgctgtatacttctgtctcctctccgcagatcgggcaggtatactgctctccggacagatatccgtgattcttacagatcgaatacgtcggtgacattgtataatacggcagcttataattctctgcgatttttctgaccagagctgccgctgacttccagtccggaagtttttctcccaggaatgtatggaataccgttcctgatgtatacagtgtctgcagctcatcctgaatatccagtgcggcaaacacatcctccgtatagccaaccggcagatgagagctgtttgtataatatggtgttccgcagtcctctgctgctgtgatgatatccgggaactgctccacatcatgttttgccaggcggtatgtggtagattctgccggagttgcctccaggttatacagatcaccatattcttcctgatagtcggacagccgctctctcatgtgattcagaacatcttttgtaaacttctgcgtttccggatgtgtcagatctttacggatccattttgcattcagtcctgcctcattcattccgatgagcccgatcgtggagaaatggttatcaaaacttcccaggtatctctttgtatacggatacagcccttcatccagaagcttggaaatcaccactcgtttgatatgaagtgatcttgcggcaatgtccatcattttatcaagtctctcgtaaaattcttcctcattttccgataaatatgcaattctcggcatattgaccgtcacaacaccaacggaacctgtactctctccacttccgaaaaatccaccggatttcttacgcagctcccgcagatccagacgaagacgacagcacatactgcgcacgtcgcttggctccatatcactgttgatataattggaaaaatacggtgttccgtattttgcggtcatctcaaataacagacggttgttctccgtatccgaccagtcgaaatctttcgtgatggaatacgtcgggatcggatactggaatcctcttccctgtgcatctccctcgatcatcgtctcaataaatgcccggttgatcatatccatctcttctttacaatcaccatatgtaaagtcctgttctttcccgcccacgatcgccggcagattggcgaggtcatttggaacagtccagtccagtgtgatattcgaaaacggcgcctgtgttccccatctggacggaatgttcaccccgaaaatgaaagattcgatgcattttttcacttcccgatatgtcagatggtctgcttttacaaatggtgcaaggtaggtatcaaacgatgaaaacgcctgtgctcctgcccactcattctgcatgattcccagaaaattcaccatctgattgcaaagaacactcaaatgcttcgccggagcagatgtgatcctgcccgtcacacctcccagaccttcctgtatcagctgttttaaagaccagcctgcacaatatccggtcagcatagaaagatcgtggatatgaatatccgcattcttgtgtgcttttccaatctcctcatcgtaaatttctgacagccagtaattggctgtgatcgcaccggagttgcttaagatcagacctccgacagaatatgtcacggtagaattctccttgacacgccagtctgtcaccttcacataactgtctacgatctctttgtaatccaaaagtgtagaattcagatttcggattttttctctctgcttgcggtacaggatatatcccttcgcaacatctgcgtatcctgctttgatcagaacagactctacactgtcctgaatgtcctccactgcaattttatgttcttttatcttcggttcaaaatctgcagtcactttcagtgccaacagatcaataatatcctgattatactctttttctctggcttcaaacgcttttcgtatcgcctcgctgatcttggtcagattaaattctgttatttccccgtccctttttgtgacttgatacatgtttcgtacctctcctttctgcagctaaacgctgtatttagtgtatcacccacatttttgaatgtcaatgaaaaacaccaacatctagtatgcaggttttccttcaaaaactagatattggcgtttataactatttcatcgtttctttataagagtcatccgcctgctgtgtgagcgcttttccgccgttttcataccacttctttacgaacgtatcaaaatattcaggcggcttttctcccactatgatctgcagaaatgtattcttctcttcttccagcaattcttccgggattttgattttctgactgcctaacgaaagaggcggttgattttcatccagattctctttcgtcaaaagtcccgttgcctgtatccgggaagtgtatgctgcccatgcattcgacgtggtcacatctcctgtaaggaatgacttacagattttataataagcagcttctaatccgttcaatttgctctgctgcgtttttccatccagaacatcctgtatattttgctgcactctgtagatcgcatcccagtagtctacattgatattcaacggtcttgctgtcggatccacattcaaagaaaaatattcattgatttcatcggactgcttctgatcttcaaaacgaccataatcaaacagtgtactcacatatttccccacgatctccggatgctcatatccctttcttaccaccacatacagacagtcttcataggattgaaatgtacgtgtcctggtcgctgcatttccagtcagcagatacggctgccattttgcagttctgtccgcactataagataaactcagtggattgttcggtgcccaccagtatccgaaaatagccccacactttccttctttaagaagtgtatccagattttcctgctgccgcaacagaaagttggagtccagaattccttctacataaagctgatgcagatagatcagcgcctgttttgtctcttctgtcacagaaccatacaccacattcccctgatcgttcaaaatccactggctcggttttgcatgatactggtcaaaaacagcatccagcccataggttccgctgttttcagaaaccagatccgtacttcctgccaaccccaccgtctcttgatttcctgccatatcagctttcacaaactgccggataatctccatcccttcctccagcgttacaggatcggaaagtcccaaccgttccatccagtccttgcgcagccacaaaagagaagctccatgatctacctctgcatccggaagtgcgtagagtctgccgtcaaatgtagccgattccagaagtgcttctccgtagctttgatacatttccttgatcctttctgtggtacattcttcatatactgtggtaagatcttcgaccatcccacgcctgaccagttctttgactgtctccctgccttttaccaccaacagatccggcagctgctgatcttccatcaaaatctgaacggcctcctcataagaatcggaattttccccttccagaacatcttcgttttgaatattcaaccgttctttcaagtatcgtgtgtaggcattatcctcataagtcgccttcacaggcaggtttgcattattagatccaacgattttccccagtgtataagtaacaagctcgggatatttcccatacggtgtgtgtgctgcattttcccactgtgcgtttatcacttctttcgattccaccgtcttaccggtttccgatcttttgcaggaagcgatcaggaacatcgagaacacacataacagcagtatgtatttaattttttgtttcctgtttctcatgtccgttctccttcttctttggaatccgtatgcatactctggttccttctccttctttactctccacccggattttattttcttctccatagagaagcacgatccgttcattgacattgcgcacaccataccctttggatcgatatgtcacgatttgactcgctttttcctctgtcattccgtttccgttatcttccaccataaaatataaaaacagctcatcatgcacaacctttatccgcaatactttttcgatcttttccgacacatccagcccgtgatcaatcgcattttccaccaatggctgcaaaatgagtttcggaatctcacaacttcccattgtattatcataaacttcctccacccggaaactattatcgtgcataatcagctggattttcaggtatgcacggatattctccatctcgcttactactgtcgtcattgtctccccccggttcagactggtccgataataggtagacaatgccagtgtcaccttactgatctcctgttcatctgcttcgattgccttccagttgataattgagagtgaattgtacaggaaatggggattgatctgcgcctgcaatgccctcatctctgtcctttgtaacacaattttcgcttcatatacttctgagatcagtttattgatctcatccatcatacgccggaaagtacgaatgagcacaccaatctcatctttggaatcactttgtacggtcacttcccggattccactgtggatctgattcatattttccgtcagctgttccagcttacagaccagacgtctggaaaagaaatagcttaagattcctatcagcagaatacaggctgtcagaagcggcagatttttcaacatcaaatatcttgccgattccataatcgtatccgtaggacaaaaataacagaatttccactgattcccttccatctcctttgtcacactggaaaaacttttctgtacttccgaaattgtatccaccttcccggtctcatatttagcgggaattttattgcaggaatacacgacattgccgttttcatcccagacaattccggcaaaatcagattccatgattttttcaaacggttcgaacaatttattataatccagtgtgatcttcagcacagcatttatctcactgctcccgtcataaaactttcgggctacaatcactttattctgacttccagtctgtacataccagcgaatcagacttctgttgtttctgggataccagctttctccctgaatctccgacaaaggagccagtgtacttccatgggcaacctgaatattatccgcatacagcgtgatccctttaatttctttgtgatacacctgcggcatattcaacaacggatctgccacctgagtatacttcagatatgtattaaaatctgatgcacgttccattttcagcactttcctgaggtctcccgaataagacagataatcaatcagattttcataaatctgcgcctgatcgtctattgcatcgactgcctgttttaaagactcctgcatattttccatttcccgctccttgagcgtgttcatcattcccatctgcatatagcatgtcacgatcaatgtcggaatgatcccagcgatcaaaatcaggatcatcagcttatatcgatatttaaaattatgaaaccgataaagaagcttcttcatcactcatactccctttcctgcaagactccggtgtgctgccaaaatactcccggaagctcctgcagaaataagaattattggaaaatccaacctcttttgcgatctgcgagatcttcatactagtattttccagaagctccctggatttcttcatccggatatcccggacataacggttcagattgactccggtctcctccttgaatacaacacttaaatatcccggggagagatagacttgccttgccagattctctacattgagattttctgcataatgatggtgaatgtactgtttcactttcataacttcattccgaaatcccttgttctgctcctgtacaaatttctccagttcacagactacctgttctgtaattgccagtacatcttcaattttcctgcagcggtacagcctgtcgatcatttttgacaatgctttcacatctcctggattgatctcctcataaatatctttgacaatattagaaaatacaaatttcacatacatctctgaaaatttcatactttctctatattttctctccagcttctgaaaatcctgccgtagatggatactgtctttatattgaatgtcctctttgatattattcaggacctgagattcttctgcctcatccatttctctggtctcctgcacttcccctgcaaagaaaatcttctgcctgggctgataaaatttttctgccagtacctcctctaaaccggaaaatacttcaggaagttcctgccagtctgtaatttcttcacttactgccaaatagcactcctcatcgtacttattcttaaaaaactgatataactcttttgccactgtctcataatctgcatatctttcctgaaacagaaataaggactcatttgctgccacattcagataaaggaactgacgggacatgtgctctctgagctgacccaaaagcttttcttcatccacttcaaaaaagcagttctcgccgcctgccaggatcatatgagtatactgccctccatcctgacataaaagctccgcagcttttgtcccgttttcttctttgccgtcatacaaaaaattctgcagaaaatattttcccagatcatcctgctgccttgcaatttctcctttctgcgtattcttctccagaatatgatctctcacagaacaatacgtcttatgaaactctcccggatctaccggctttagcacataatcgactactccgtaatgcagcgcctccttcgcataagaaaaatcattgtatccactaaaaatcactatctcgatctccggctgcaactcccgtgcagctttcgccagttcgagccctgtcatataaggcattttgatatccgaaaacaaaatatccacctgttttttctgcaaaatccccgctgcatctttcccgtttattgcctctaaaatctccagttcttcctgctctcgtttcagcagaaacttgatcccgtttctctccagtttttcgtcatctgcaatcaatatcgtgatcatgtccgtccctcctctgatacatgccaaaaaatccgccatgcccctctgttggctgcatggcagattttttattgatctgtcctctttattttaatccattcccttttttcttacaagccttatcccttcacagctcctgccacgacaccttctataatatgtttttggcagcacagataaaagattacaatcgggatgatagaaagtaccagcgctcccatcatggctcccatatccacagatccatatccaccttttaaatactgtactgcgatcggaatcgtccggtatttcttcgtatccagcaccagagacggaagcagataatcattccagatccacattgcctgcagaatcattaccgtaatgcaagtcggttttgagattggcaggaccaccttgaaaaaagtctggatcggagtacatccatcaatcattgccgcctcttcgatctccagtggaatggacttcataaatccggtaaacataaataccgccagcccggcaccaaaccccagatagatgaagatcagcccccatggagtattgagtctgagcatatttgcaatcttggacaaagtgtacatttccatctgaaacggcacaaccatggcaaacagacaaagcatatagatcagttttgtccaccatgtattcacccggctgataaaccatgcacacatggaacagcacaggataatgactgcaactccgcccacggtgataaacagactccaaccaaatgcctcaaaaaactttgtctgctcgattccgcggatataattttccaatcctacaaacatattgtcttttggcagatcaaatggcacccggctgatgtatgcttttttcttgaatgagttgatcacaacaagaatgatcggatataagtacagcaggctgataacagagaagatcagcgtaaccagccagccatgttttaattttttgttcactactgctgcacctcctttgatcttgtcatgcgattctgaatcacggcaaccagaccaacgatcagaaagaagatcactgccttcgcctgaccaacaccttcataaccggctcttccatagaacgtattgaagatattgagcgccagaagttctgacattttcgaaggtgcaccattggtcagcgccaggttctggtcaaataacttgaacccgtttgttaacgttaaaaatgtacaaatcgtgatcgacggcattaccatcggaataatgaccttgcgaagtacctgccgggagttggctccatcaatcttcgccgcttcgatcagctctccgggaatattctgaatgccggaaatgtagatgatcatcatatatccaatctgttgccagcacaccagaatgatcattcccatcaacccataggtcccggaatatgtaagtgtttttccccaatgtgcaagcactccgtttaacagaagctgccagatatatcccagaataattccaccgatcaaattcggcataaaaaatacagtccggaaaatatttttcccgcgcactggttttgttaataccatcgccaccgcaaatgccagtacattgatcaataacatggacagtactgtaaacaacacggtataccacagagagtgtaaaaatgtaggatcctgaaatacctttccataattctcaagcccgataaatctggcgtctgtcacggttgtaaatttacagaacgaaagataaatacccagtaaaaacggtgcgataaacccaatggtaaatgcgatcatcgtgggcagtacaaaaacagggaaatatcgttttattgctttttgcatgtccctctctccttcctcttgatggaaaaggcggacggtttgccgtccgcctcaaatctatgtttttattccgcatgcgctgcctgatactcagttgcccatccatctacaaatgcagtttccactgcatcccattttccagttccctgtgcatattcaagaagtgcagagcctacattgtttttccagttttcagaaggcattgtcgtaaagttccagcttacaggtgtcttgcctgccttgttatattcctcatttgcctgcaccagaggatttgacggcagatagtcttcaaatgtggtgaacggtgtcacaaatcccatcgtatttgcaagcatatcgcgtccctcatcactttccacaacccactgcaggaaatccagagttgcctgaatatcttcttctgaagcattcttattcacacaccagtagttctcagatcccgtgcaaagtccctgctcttcttctcctttggcaccgatgtagattggaagcattcccatgtcctcatcggcaacttccatatccttgatgtcgttgtatgcccaggtcccattctgataaaatacagcctctccaagtgcaaattcggagcttgcgtcctctgccgtcttagaggagatcatagacggttcacaggtagaatctgtaatatataaatcccatatgtttttatagttttccagataggttcctttaatcgcatctgtggatgtaatgccctcatctttatattcataatagattggaagatttgccagatgtgtcttaaatctccagtcagaagaagaatccatacctgcggatgtaaatgcacctttcacccccaattcatctttgtgtttctggattccgtccgcaacttttttcagcgtttcaaaattattgatctcatccactgattttacagcagcatctgaaagttcaaagtattgattcaggatcgctttgttataaataattccgtatgtttctactacatacgcaattcctttgacttcatctccttcttttaacacataagcgtcactggaaatatccttgtaaatctgactgtctgacaggtcataacagtaatctttccaggatgccagaccgacaggaccattgacctgaaacagggtcggcgcctcttcttttgccatctcagatttcagctgggattcatacgtcccggaagcagctgtctgcacatccacctgaacaccagtctcatctgtgtaagtctctgcaagttttacccagtcatctgcctgctccggcttgaagttcagatagtacaccttcccttcactctttgcctgattttttcctttttcatcttccttgccatcggatctgccgcatcctgcaagcatcgttcctgccattgctactgtcaaaagaagtgccagcattctctttttcttcattatcgtttcctccctttttgttcgtctctgttcttgatatctgtattatagaaaaatatggaattttctaaaataataaaaaaaatagaaacgtaacactttttgaggaaattatactaagaaacagtggctgattattacatgattttgctcttttatacatgaacaataaaatacagggagggtatgacccgttttgagccacatcctccctgtatgaaaccgtctattttcttgaattttcaggcttttctaacaattgttgttgagataacttttaacctacacaccccttaacttcgcattcggaatatttctctgtacaatccccagtgcctgttccataatctcttttgtataccccttcattccggggcaaatcaaatctccggaatctacaaagctctgcagataatattgttttgcccccttgatccatcgcccgatagcagcaaaatcttcccgcttatggaactgccgcacgaccgtggtgcgaaattcatagggaacatcccctgacatcagaaaatccacactctgaaaaatattggacatatcatattcttcaattccaatggtcataccatacttatccggagcatttttgatatccattgctacatagtccacaagcccctgttccaccagccgtctcagacgcaatacattactgccgttggtatccagcttgacctgataaccgagctctttcactttccggataaactcttcgatatccggctgaagcagaggctctcctccggtaatgcacacaccatccagaatcccctgccgtttcgcaaggaatgaaaacacttcctcctcggaaattgctgccgccgcatctacgtgtgtcaccagagaagcattatgacagaacggacagcggaaattacatctcgccgtaaaaatcgtacacgccactttttccggataatctaacagtgtcattttctgaattccatgaatctccatcgccgtttccccctcatgcctgtcactttactctacatatttctggatttttccgcacacacacgcattgcctcgataatagcacttcgaaaaccgcgctcttccagtacctgcactgcttcgatcgttgttcccgcaggagaacataccatgtctttgagttcacccggatgttttccggtctccaggaccatcttggcgcttcccatcactgcctgagcggcaaacttatacgcctgaggtcttggcattccatctgccactgccgcatctgccattgcttcgatcatcataaatacatatgccggagaacttccgcttgcagacacaactgcatcgatcagatgctctgatacgacttctacctctccgaaagagcgcaggattgtcagcactttttccaactcttcttttgtaaccagagcatttgcacacgctgccgtcatccctgcaccgaccattgccggtgtattcggcatggtgcgcacgatcttgacatcttttccaaactgcccctgcagccattccagagtttttcccggagcaagggtgacaattacctgctcatccgtgatctcatctctgatctgtgcgatcgtctgttcataatactgcggttttacagaaagaaccacgatctctgcctttgccgcctccctgttgtcatctgtcacacagattccataaagagaatgtaccttttccctccctgcttccaaaatatccgaaccgatgatttcttccggcttcagcactccgtttctgataataccacccatgatggctcctgccatatttcctgttccgataaatcctaatttcatgatgctcctcctgttcattctataaaccaagttcttctttccttcatttcacagtaaatgccttctcttcctccagtggaatctctcttgtatcgatccactcgatggagataaactgattctgattcagtcccaccagaagcttgttgatcagcgtttcccgtccctgtacttccattgtcacagtgccgtcccactcatttctcgcccatccggtaagtcccagtgacaacgcaagatattttgcagtgtagcggaatcctacgccctgcacctttccatgaaaaacaaaatgttttcttaccttggacatctcatcaccactttctgatatttctgtgtccaacttatcacaccgtatcacccctgtcaatatttcagactgaaacaataaacctctatgtttaaaactgtgctataataaaaaaatataaaaacattttttcagaaaggagtcaacctgatggatccatatctctgctccctgatcgaccaactggaacaggaacataccctcagcgcttcccaatggatacagctgctgaacggacgcacaccggaacttgccgcatatctctttgaaaaatcacgccgtgcacggatccggttctacgggcatacggtctacatccgtggactgattgaatttaccaactactgcaaaaataattgttattactgcgggatccgcagcggcaacacacatgcacatcgctatcggctgacaaaagaggatatcctcgcctgctgtgcggatgggtacaaacttggatttcgtacctttgtcctgcaaggcggagaagatccatggtatacaacggatcgattatccgacctggtccacacaatccgcaccatgtacccggactgtgccatcacactttctatcggagaagcaactaaggcagaatatcagcagctttttgatgcaggcgctgaccgtttccttctgcgccatgagacccacaatgcagaccactaccaacagctgcatccgccgcgtctattggcatcccacagacagcaatgtctctgggacctgaaagaaatcggctatcaggtgggaaccggctttatggtaggctctcctgggcagacaacagaacatctggcagaggatcttttatttctcaaagagttaaatcctcaaatggtgggaatcggaccatttattccccatcacgataccccgtttgcaaaacaaaaagcggggactctggagctgaccttgtttcttctgggactcattcgcctgatgcttccaaaagtactgctcccggcaaccactgcccttggaaccattgcccccaacggacgggaacttggtattttatccggggccaacgtggtcatgccaaacctctcccccaaacaggtacgaggcgattatctgctctatgacaataagatcagtaccgatgcagaagcagccgaatgccgggcagagctggagcagcgtatgcagtccatcggctatcaggtgatcactgaccggggagattctttaaacatcaccccttaacaactttcttttcttattttacaattggaggaatgacttatgtatgatgtatattcaaaacatgcagatgattttatcaatcacgaagaaattttagaaacgcttgcctatgcagatgagaataaaaccaatgaagcgctcattgattcgatccttgcaaaagcacgtctgagaaaaggactttctcacagagaagcgtccgttcttcttgcctgccagatggaagaaaaaaatcaggaaatctacaaactggcagagcagatcaaaaaggatttctacgggaaccggatcgtcatgttcgcaccgctctatctgtccaactactgcgtaaacggctgtacatactgcccgtatcatctgaaaaacaaacatatcgcaagaaaacagctgacccaggaggaaatccgcaaagaagtcattgcactgcaggatatggggcataaacgtctggcgctggaagccggagaagatcccgtacgcaacacgatggagtactatctggacagcatcaacaccatttacagcatcaaacacaaaaacggcgccatccgacgagtgaacatcaatatcgcagcaaccactgtggacaattatcgtctgctcaaagaagccgggatcggcacctatatcctgtttcaggagacgtatcacaaggagagttatctgaccctccatccgaccggaccgaaacatgactacaattatcataccgaagcaatggaccgcgccatggaaggcggtgttgatgatgtgggaatcggagttttattcggactggacaaataccgctatgaatttgcaggacttctgatgcacgcagagcatctggaagctgctttcggcgttggtccgcacacgatcagcgtgccgaggcttcgtcatgcggacgatatcaatgccgatgaatttgacaacggtattgatgatgatacctttgcaaagatcgtggcatgtatccgcattgccgttccttacaccggtatgatcatctccacccgagaaagtcagaaatgcagagaacgggttctgcaccttggcgtctcccagatcagcggaggctcccgtaccagcgttggcggttactgcgagccggagccggatgacgcaaaatctgaacagtttgacgtcagtgataccaggacgctggatgaagtcgtgcgctggctgatggagatggattacattccaagtttttgtactgcctgctatcgggaaggccgcaccggagaccgcttcatgtctctttgcaagagcggtcagatccagaactgctgccatccaaatgcactgatgacactcaaggaatacctgatggactatgcttcaccggagacaaaagccatcggagaccgtctcattgcgaaagaagtcggaaacgtcccaaatgaaaaagcgcgtgctgtggttctggagaatcttcgcctgatcgaacagaacaatcgccgggatttccgtttctaacagaaaggagcatctttatgacactcaaccagaccccttctgccgaacgtatccacatcgggatcttcggaaaaagaaatgccggaaaatccagtctgatcaatgccctcgccggacagccggtatccattgtttcagattttaagggaaccaccacagatccggttaaaaaagcaatggagctccttccgctgggacctgttgttctgaccgatactccgggactggatgacaccggagagcttggaaccctgcgtatcgaaaaaacacaacagattttaaataccacagatattgctctgcttgtcattgacgggcagcttggcataactgaagaagatacccggatcttacagcaaatccgccaaaaacagattccttttgtgatcgctgtcaataaaatggatcttaccatagcttctcctgttcttccggatgaaatttcccgggagcagatcctgtatgtcagcgctgccgcgggaacacacatccacgaactaaaagaactgcttgcaaaacagctcggacaaacaccaaaaacccgaaaaatcgtgggagatctcatccatcccggagactttgtcgtgctggtcattcccattgacaaagctgctccgaaaggccgcctgatcctgccccagcagcagaccatccgggatattctcgatcacggagcaaccgcaattgccgtcagagaccttgaactttctgaaacgcttagaacccttggaagaacaccggatctggtcatcacagacagtcaggtctttgatgccgtcgccaaaatcgtaccaagagaagtaccgttgacttctttttcgattttatttgccagatacaaaggaaatttagaacttgccgcccatggtgcacagaccctgaaaacattaaaagacggggatcatgtactgatctgcgaaggctgcacccatcatcggcagtgcgaagacatcggaactgtcaaactgcccaggatgctgaaacagtttacacagaaagatttgcagtttacatttacaagcggaacggattttccgtcagatctgtctccttatcaggtaatcatccactgcggcggatgcacgctgacagaaaaagaaatgcagtatcgattagattgcgcccgagaacagggcattccaattacgaattatggaattgccattgcgtatatgcgagggattttagagagaagtatggagttgttttaaaaaacaggggcaatctgcccctgaataaacttaaagtcagttttgtgtaaaattcgatatttgctcatttatagttcttatttaactcataagctttgatctactttgacttcgatttcatccacatcttccacacgtatcatttttacaatttcctgattctttttatctttcagagaaattttcagccactcttcatcacagtccatcacatgacattcaaactctgtttttccagcaaaattgattcctttttcacttgaaattttgcaatctcttcccactaattcttcaatcagttttgacatgatactttctctgcacctttctttttctaacttttttactttcctttcaagctttttcactttatcaggatacgacatataacacagcattataataaatgccaacacacccaaatattccatattgccaccttacttcgccaccggcaaaaatggtgccagaactcctgccacattcgaaatcggcatcgtctgcagccagatatgtcccggtccgctgacgaccgtgttgaataccccttctccgccgaacagcatattcttcacacccggcacgctctgaatctccatgctgcaggtcgcatccattgcagccagatatccggtatccaccacgatctgctgccccggctgcagctcatactctaccacatgaccgtcaaattccagaaatgccataccgcgtccggaaagcttctgcatgataaatccctctccgccgaaaattccggaaccgatccgcttctggaagaagatcgacaaatccacgctggcttccgctgccagaaaaccagacttctgtactacgatttctctcccgggcgcaacctcatgtgcaacgatctttcccggaaaactggatgcaaacgcgatcattccgtgaccgccttttgcagtgtacgtgttctggaaaatcgactctccggaaaacatcctcccgaatgctttgccgatcccgccgttggtactcgtctccatcttcatattcggggacatccagctcatggctcccttctctgtgatcattgtttctccctcttctaaagtacagatcactgctggtaatgtttctcctacgatttcatatctcatacgcattctccttatagaattgtattatattattagtacaattgtaaacatttttctttgcactgtcaaccacacagtgtcaatattctgcagaaattttttgaatcccttattttataggcttcacaaggcttttccacttgctctccactcgattttcttgattgaacacatttttacgacaaattcttggaaaaatatatttgtctgattttcttaccacattttccaacaacgacttatagtttcaatgaaaaaatcatattgctgcttattccgcttatattccatagaatcattacggaaataatgatactaaatcaccggaacaaccatttcctgcaaactgatacccccatgcacaaagttcatactgcctccatagattttccgaaacgtctcggtctgctgacacagacatatggctgcatggtatttagcacacgattcgtatattttatcaaccttgttttatctccataatatcagaatttaccactctctgaagtttgccgttatccggattctatgatttgtgaaaaaaatacagacccacaatttctgtggatctgtatcttaattttttattcgaaggttccggtaaatttccagaccatgtccggttcttccggaaggtaagttacgtttggacgccaagttacaataactttttcttctgaatttacccacaggcaatactcttctttataggaggtattcataagtcctacagacaaatacaacgcttctgcatccatcgcataagccacactgtgatatctttttgtaaaatcagttgggtacagatcattgcgtttccatgctttgtatcctgcataaagtactttctgttcaccatcaatcacagctgcaatctttattctatatccctctttcgtgaacactgcgctctcgatctttcgtggattttccgtaaaaagaatctttcggttaaatactctttcagcttcctgtctggcagttcgaaatgtaccttccggctgtacaagtgacagattgcttatcttggttcgaagtgctttctctgctgcttccagctgttcctctttacacggttcagaaactgcttcctttatatatttcagacagatatctgctgcaagatattcacgggcacctgcggtaattccgattgctactggaagatcacggaagcaaataagatactgaccaaatgcaccttcagccgcaaaaatttcttttcctgcttttatatgataagcataatgtgtcagtgctttcttttcatctcccggaatttctactctcggttttcccatttcttcaatccaccaggccggtacaatctgttcacccttccagtttcctttctgaagcagaagttgtgccagcgcagagatttgcggtgcagtcagatacattccccatccaccggtattatgtccttctgggcttgtcagccagttaattctgccaagattcattttgtcaaaaactctcttctgcatgatagataaacagttttctcccataaccttagatatgattcttgaaagtgtataactgcatccggaatcataatgaaaaaccttaccgatatcttcacgaatctttggctgtttcagccagtttgtctcccagtctttctcaatcctggaaaaccatacattgttgcagcattcctttgatcctgcctgcatggtaagcagatcataaattgtaatgtcttccagtgcttcatcatacgcttccggtaattcatctctcacataatccaagagatgatcttccagatgaagtttcccctcgtctacagcaaaaccaagacatatgctggttcctattttggacagtgaatgcatcatctgtggatcattcagtgaaaatggtgaccaggctccttccagaacagtctctcctctgtagcgcacagatatgctatgcagttccactgtattctcaagttcttccagcatttcttccagttttattgggttaagttctgttcttgtaaatatattattcattattctcctcctcggacggttgccagatagatgtttcaatacggataccacccttatttgtaagataaattccaatcagaatcaatgcaaccatcacgataactgcggaaattgcatatgccggcttgatactgaagattcctttcataaagattactgtatatatgataatactaatcgtgcaaaaagcatagagaccgccttttttaagatggaatttatttttgctccatgcttctggatatttctttggaagacgtgagattgcatatacaacagttacattcataaagaatgtaatcacctggaaaatatttgtaattgttacgatactcatgtcaaaaatgattggaagcaatactacaatcaatgtatatgtatagattaaaaatggtgcgccaaaacgattttccttcagaatcctttttggaagccagccatctttagcagcctgtgcaattgggtatctgacatcattgaatactccattcagtgttgtaataattgccatgattggtccaccaatcatgaaaatcttgtagactactgacggcaggattgcctgtgctgccggaagaatcgtttccacacctgctacctcatcatgcggaagaacacctccggttaccatggccagccctacataaataaccaaaagacatggtacacaagacattgcagcaaacggaacatcttttgttgctttctttgcatcttttccataccaaagaatattgtaataaccattagcagagttaatcagaagcagcgcagcaagcatgaatcctttaaatccaccggtaaacattttttcaccagaaaaatcaaagattggctgtctgatctgtgtaagtccaaaaataacatacaacaccattgtgatcaaaaggattgtagacagtattttactgaccttagcaaaaatatccattccaagcagattcagaacaaacaggataatcacacctataattgcaattgtcttgactgtaatattcggaagaagattattaatgtacaatcccaatgcaagagcaaaagaactgttcaaaatcggtgttaccaatttcgtataggctaccagaccaccggcgctgacacctgaaagattcgtcacaatagaatatggtccccctgccactcgcatggttccgcccagaatgatgtacgggaataccattaaaaatcccatgacaatcgctgttaaataagcaagccatacagaatatcctgtatatgccatcgccggtccgattagagttaccatccctgacccaattaccattcctaccgcgattgcaaacaggtctcctctgccaagaattcccggcttcggttcagaagtgttcacaatgatgtttctgttactcattttacctctcctttactttttactttttattttttattttttatattgtatacattattagaataaataaaaacgtctccactgtcaataatctttaacaatttcgacgttttgcaaaaaatcagcacttcatttttgtatacttttactatttaagcatattggagaaggaagtttttaccgctttcatcaatatgtgtatgcattttgagataacattctacttcatttccacttcggatacattcgatgatctcctcgtgttctttgagtgatttgcggacacactcctcttcattcatcttcatgcctctagaaagtccattccatagctctgataacatattttcaagcttatcgtttccggctgcaagccacagttccatatgaagtgtctggttcagactggcatagctttcgtaatcgccatcctcgatcacttctctggaaactttgagaatctggtcaattctcttgagctcgattttattcttgcagcagagaacgcaggcttcgctctccaatgccgcccggatctgaaaatgttcccggattgttttttctgttacgcccacaactactgctcttttgttctgcttcagttccagaagcccgtcccttgcgaggatctgaaaagcctcccgtaccggtgtgatggatacacccagttcctgcgctgtactttccagtgtcagaacctcccccgccgaaatcttctgagccagaattgcctcccgaagcgttgccgcaatcttctcacgaataggtaatgttttgatcggtttaagcccaagcatttttgtttctcctgttcttgtagatttatctgtaattattgttttatcaacttgctcttagaagaatattttatcgtagtttttgtttgttgtaaacaggtagattaggggtcatttttattttggtaatatctggtttgaacagtaacaacagttccaaaaacacatctttcacaccaccggcgttgaatgcgcggatacgatttcctttgtatttgaataaatccgcatcagaaatttgacaccatttttataaaatgacgctttttgataaaatgtgataaattcataaaatctgtgatttataacattctcgcgactgaaatgaaaaaaacaagcaatcccgctgcaaataaaaacaaagacccaagaatcagaccgattaccagtcccggtttgcctgacgggaataatttcgtgcgataccccggtgtttttgcatgaatcagataatttccgatatagatcgccccgggagccgcagaagccatcatcaggtacatccccactgccggaagcatatcctgagcaccctgcgcaagtgtctgtgcctccatatacagctccatcctggaatacactccctgcatggcataaagtaaaatgacaggaagtgcattgttaataaaatgaaacagcatgttataacacatatttccggtttcccacaacagatatcccatcatcaccccaccgatcgccgtcggaaaaaatcgaaaaacatctccgtggaacatcccgaaaatgcagccactgatcaacagtactgcccattttccaagccttcctctcagactgctgacaaatgttccccgaaacagagcctcttcacagattgccggtgaaattgctactgtaacaaaggacagcagaaacggacctgcggcaatggacgatgacagcccgtcattaacctccagaatctgatcggggaaaaacagactcaagatcaaaagcagtaccatttcacacaaaaacgtccctacccaaatcagaattgtgcctgcaatccccgaaaaatgaggtttcttaagcggaaacacctcccgcagatccccgtgaaacaaaaggacagcccccgctgccaccccaaacagaagaagctctccgagcaaacttccatacatgccaaacggggacagcaatatcggcgctgccacaaacaaaataaccgcagagaccagcagggtgagtacaccctgccagatcttcagcggttttttcactttacattcctgtttcattttctccatccggtacctcctgtctctttggaaacacaatttctgctttaaacaaatctgcttccgtggagatctgcagagtgccgtactgtaattctacaaagctctttacaatcgccagaccaagtccgcttccctcggtatttctcgaaacatcccctcttacaaaacggtctgtaatttcatctgtattgaaattcagttccgcagaagacacattcttcattgagatccgcacatcctgttctgtctctttcatatcaatatacacacgcgtatgcggcattgcatacttcgtgatatttacgatcatattctcgaaaatacgatatgttttctggctgtccagccataatacgatcttatgttccggcagattccacttcatttccagatttgcttttctgatattactatcatactccaaacctacctgttttagcaaatctacaatgtcaattttcatataatgaagtgttaccgttctgctggttgccttactgatctcaaacagatcctcgatcagcactttcaggcgcaaagactttctctccagaactccgatgtattcttttctcttttcctcatctgtctcattttttaccaaatccacatacgtgatgatcgctgtcagtggtgtctttaaatcatgggaaacattggtgatcagatctgtcttcatccgttcactcttgacttcctcactgactgcttttttaaatcccgtctgaatgcgtttcagttcattctgaaccggcgcgaaaattcccacatctcctgtaatcgggaaatccagattcccttccgccagctgattggtcgattttaaaataccctggtactgttcctgcaccttgttgaggtactttctcaggaaaataaacaatccgacggaataaatgatcaacacccagattccatacatccagaacatactgatcacaaagatcaccgcaaagttaagcaagacgatccgtaaaatagttttgttggtattatcccggaagtcgatatgcagcaacgcttcatattgatggcggcagaatgctttgaatgttctccagcatccaagaacaagttttttgatttcctctgtcatgctgttccctccattcttcagccacaataaaaacttcacacacaaggacctttctcttaaatacgatttcttcagtacaaaaatctctctgacgcatcctgccagccagtacaccactgtaaaatacacaaaccagatcactgcattcgctgccagagaaatggcatcattcagattttctccatagcttgcagaaaagacctgaataaacttgtgactgcatgtattccatatcatgatcgccagtgtacggacatacgccatcagacaaagaccaatgataaatgcaatttccagcggacatcttctgggatccactatagcgtccttttccaacgcccgtttcttatactgaggaatcaaaaacgctgctgctgcactgaatactgtaaaaatcagaacagaccagttaaaggacggctgctgcatcagttcatctacatacatatcattcgatgtctcatactgctccagataagcctccagattctgttctgtcatctcatacatgatctgcacctccgatggagtcgaaatataagacgccgctgaataaacgctgttgtcatacagccattgctctgccgtaaactgaaggtttttatcatatgctgttccgcccacctggatatcggaaatatctccgtcaacatcaaacgaaaagcgaacacacagtgcatacgtatcaccgtcgaactcttccggcaatttcttggcagattcatccgaggtcagcattgccgttccggattcatcaaaaattccatatttcatgtactttttcatcaatccgaaacgactgtttccatactcttctatcacctcggaagactccgtctcattcgagatttcattatataacagataatttccgtccagaatcggatccagcatatccagcatctgctcttcttttcgcatctctttttgatcctgatccgttatataggaagaaaacgccggataaaaaagcagcattccgacagatgagatcaacagtacaatgaccgtcagaagatttcctcttttattgttgtttttcaattttgtatccaactccccacaccacctttaagtattttggatttttcggatccagttcaattttttcccggatattccgcacatgcaccatgatcgtatccgtattgatcgccttttcctgccatacccgctcataaatttcctcggcagaaaatactctccccggattcttggcaagaagaagcagaattttatattcgatcggtgtcagcttcaccggttttccgtcaattgacacttccacagtgtcctcattgatctccagaccgccgatcacatgcacattttcacgaacttccagcttttccataaatcttctgtatctgcgaagctgggaattgactctcgccatcagttccatcggcgtaaacggttttgtgacataatcatctgcaccgatgttcagtcccatgatcttatctacttcctcggattttgccgataacataatcaccggaaaatcatatttttctctcagcttcatagtcatccggattccatccattctcggcatcataatatccacgatcgccagatggatatcctctttttccatgacttccagtccttcaatcccatctgcagccaaaaatacttcgtagccctgactctgcaaatagatcttaacaccttctctgatttctttatcatcttccacaaccaaaatgtgattcatttccatctctcatccttctccttttctcgtcattttatgcggtcacgcaccttttaacagtataccacattctgagacttctgctcttgtcggaaggtcaggaatttgttttttattgacttctccataatcgtgaactgcgacgatgactttcgaaaacggaagtggaatcgcatagtggtcccatctccagaacagccgaagacatccatgataagaaactgaaattcccacaaaggattcctgcgcctgctctgccagataaaatgccagttttttcggctcatgccttggtcccagcggtccgtccagcgccaccgcaatggaacgcgtctgctcataagaatcctgtagaatttttttcagtgctccaaacgccgcaaatccgtcgggaacacgcagggcatgaccgccgcatgcctgcagcatatgttcaatataatcccctcttgtgtctgctgtcacaatgacatctaccggactggttttcccggataactcctccagcaccagattcatcaaaaaactgtcctcatgccagaatccaaacacctgatttcctgtcacaaattggatttcctgccattcgatcgcaaccgtctttttaagaagttttaaataaccggaaaacagatgctgcagaatgttctttcccactttttgtatgctcctcatatctcatttcctcttttctttccatacactgacgatataatgtttctgcatgtgcagccagacgtgacgcccgatagctttctgcggtctttagtgcctccatgcaaacttgtctgtaatctggactctgaatcagctctgccgccttatcactccagatttctacatcctcttctgtcatatacccgttgattccattttttacaacatcttccacgccactcgcccgaactgccacaatcggattgcctgctgccattgcttcctccagaacaatcccctgtgtctctgatttcgatgcgaacaaaaacagctcacttgcatacagatactgctttacatcctcattcgatatatttcccagaaagaccacggtatcggacaatcccatctgttctgccagtacttccagttccttcctcatacttccctcacccagaagcagcacacgaaacgaaaatggcagcttctctttcaaacaccggattccattcaggagaaatatcggatttttttcttcctccagccttgagacggaacagaataaatgtccgtttttctcttccccaagatattgtctgcggatcgtttttgtcttctcttcatcctcaatataaaaactgtcatccaacccggtcggcagcactgccatggaaacctccgtaccgttttcccggatccggttctgcattccaggtgtcggcgcaaagatcagatcacatttattcgtaaaccatttcatatattccgggatcacagtctctttggcaaaccagatcagcttttttctccacatccctgcctgctcttctctgaaaaacggaatataatgcaggtagtcttcataccgtgtgtgatacgtataaataaccgggatctgatacttccgtccaagatacaatgcctgcgttcccacaaacatcggctgatgcacatgaatgcagtcaaactcgtgttccttaaatcctttccagatttctctgctgaccagcttcggatataccatgccgttttccatcttctgacgcgtcacctgaaaccggatgacatcgtcctcttccacctgcccgtagcgtggatcaaatccataatctggtgcgaagaccgtcaccttgtgtccctgtttcctcaattcttttgccagccgctccacggaaattggaactccgccgacaaacggcttatagttatttgtaagcatcgcaatcttcatgacgtttccccctcttctatgccaaaacacgaatggctgcttctccaaagaaatatccggctcctacaaacaccagattccagatcagaatccccagacaggaactgatggtatatttcacaaaatccatttttaccatccctgccggaatcgaaataatcgtacgcaccatcggaagcagtttactcacaaacactcccacacttcccttttcccgaagcatgtcgatcttactctccactgcttccttttgtttcggaaatttcctgaagtaaaagcccagcaccttatctccgcctgctcttcccagccaatacagcgcccagcttcctgtcagtccggccgccaccgtcagtaccataaccagcggaaaactgatttcaccctgagatgcccagatcccggaaagcggcatgatcacccccgccggaaatcccggaagattcagatattccaaaagcacgatcagaaagatgaaaaatgctccatattcaagaaaataatttgtcaatgtctggatactcatagaaaacggcctcccttacttttgtatttatcttaaaatacaaaaataaaggagaccgttataagattcaaaagaatttcttaaggatgtttaagaattttggaaatccgattccagaagatctatcacatcatataaagtgtcaaacctgcgccatactaattctaaaaccgcttcatccggctctaccagatccggaatcatcaccggacgcatccctgcagctgctgccgagcgaatcccggacggtgcatcttccagtgcgattgcaaactcgggcaaaacctgaatggaagcacaggctttcaggtaaatctcgggatccggcttccccgccgataccatatttccataaacagcgccgtcgaaataatcaaacagtccatatttctttaacagcagctgtgcatgaagctctctggaagaagtcgccagtgccagccgatagccatgctcttttgcatactttaaaagctcctctgccccgggctttctgtctaccccgtcttcttccatgatccgatgatagatccgacgcgtattctccgtgaactcttccatcggaaaatccggcgatacatgctccttaaaatactgctctcttctcactacattgaaaccaatggtatgataaatatggtcaccgaaccgttctccgaatcccatctgccttccgacttcattccacgatttctgtacgactctctcggaatcaaagagaagcccgtccatatcaaatactagtcctttaatcggctgctcactcatctgactgtcctgccgtcctttctgttccctactgttctctgaacacaacacttccgtctgcagcattcatcttttcaatgattgccagagactccagctggaatccaaggttacggatgatccgtccacctgactgaaatcccttctcgatcacaatcccgattccttctacagaagctccggctgactgtacaatctgaatcagtccctgcagcgcacatccgttggcaaggaaatcatcaatgatcagaaccttgtcttccgggttaaggaatttctttgcaacgatcacattgtttttacacttatgtgtgaacgattctacctctgccacaagcatctccccttccagattgatgctctgagatttttttgcaaatacgaccggcacatgaaaatgctgcgccgcaatacatgcgatcccgattccggatgcttcgattgtcaggattttgttaatctcttttccttcaaaacgcttcttgaattcgcgtccgatctcattgaacagatcaatgtccatctgatggttcaaaaagctgtccaccttcagtacattcccctctttgataatcccgtcttttaaaattcgttcttctaaaaaattcatcttctgcttctcccaatcactttttgattttgttccccattatacctgttttttctctgaaaaacaacaagttttatatggcttatatcttctccgctttttccggtgtctcgatatcctcaaaaaccagaaatacccttcttaaaagcagcgaattaagccacactatcaaagaaacaccaagtaacagccagaccagaaaacctaacatcaacgtgcgcactgtcagaaatgtcacaactaccggtactactgtaatgaccagcatcaaaagtgtatatggcatttttgcaaccgtaaggatcaatgcatttttcaatgtgttcttgatccgattttcatatcttgcctgcaacgcaaatccatagatccccatgctgatcagcaggatagtcatgaagatcaaaaatacctgcatcacagtcctgatggacggactcatcatacgaagcagcataaagtcgactacaatcacgatcccaaacacaagatacaaaagccacatcagtgtgctttgtctgaaattctccttaaatgcttttaagaacccttttactatgtagccctcttcattctttaccagcttcagcatgaccgaatacattgctgtcgtggaaactccaatcgtaatgatgggaatggaacatacgatccacaaaagatttaaaaacataaaatctgctactttccctaaaaaacgtgttaccccattgtctatccagttcatttttctgctctcttttctattatttttctactattataacatgccattctatggcatgaaacacttctttccgaaaaatgtagaaaaacctccgggaagcgaaagtaactgccatcttctctgcccttgttatatatttctatacaaaaaaacaggacaaaaacaactccatttttgttttcgtcctgtttgcatgaaaaaagcgggtgatgggaatcgaacccacgtatccagcttggaaggctggtgttctaccattgaactacacccgcatgtttctttatttttttgtgtccctcaagacaagaattataatatcacacggtttcataaaatgcaaccccttttttcaaatttttttaattttttttaatttttttaattatatataatattcctcatttttagcatcactcttgccattctgcataaactaggctatgataagaaaaactaaaggagtactaacatggcattaaattttaatcaactggcaatgcttcagaagcttcgcagcagtgtccagacatttcgaaacaatcaccctaaatttccactctttctgaatgcagtttctgcagacgcattaaaggaagatacgatcatagaaatcaatgtaacttctccggacggcaagcactattcttccaacctgaagttaaaatcagatgatatcgaacttctggaaatgctgcggcagctgaattcataactcgttgctgttcacagtaaccgtaaatcccaatccccttttgacttctatcttcgaaagtactataattcaatatagaaactaaatgagaagagggctttgtcatatgagtaaacgtctggataagaaaaaactgaaaaggcagaccacagcaattgaatcccctattgctgagacatctgcatccaaagaaaccataaacttttttattcaatatcaggatcaggaatatctggaaacagaaattgtctccagagtcagggagtcttgtctcttaaacggtgcttcttctgatgagctgaatacaatctcgatctacttaaaaccggaggacaaaaaagcatattttacatacggagaaaataaaagcggatttattgaattgtaagggctgatcctctaaagcagaaactgttgtcaatttacggcagtttctgtttttttgtaaccattttctctaaatttctgtctaacctatgtaaacaaatacaaaagctgccggcgcttctgtattagaaaggatactgtttatatgatgagtaaagacacagatgagataaaactaattaaaaaagcaatccgtggcaattccactgcctatggatacttgattgaaaaacaccgtacctatctgtacaaaatggcttttctatatacaaaaaatgaacaggatgctttagatgttgtaggtgacacagtcctcaaagggtatctgcagataaaaacgctgaaaaacgcgtctctgtttcagacatggattacacgagtgctgatcaacacagctcatgatcatcgtagaaaagccctaagcacactttcacaggaggattccgctatagattctgcacatgcttccacagcaaatcaacagattccatctgtcgaacattttgacctgcaaaccgctatcgaaacacttcctgataaataccgcattcctattttactaaaatacttcagtggtatgacagtcgatgagattgcctggacactcagtattccatctggttctgtcaaagcatacctgagtcgtggaagaaatgaattaaaacaaaaattaaaggaggactatctctatgaatcttgattttgataccattgaaatcccggaagaaaaactcaatcgaacaattcaaaacaacataaaaaaagtacacggtattcatcgcaaacaaatgattcgccataccgcgggattattttgtgctgctgcttttttcttctgcctgagcgctatatttttgcactctaatccatcacttgcagcagaccttttacacctgtttgaaaagatagaaaacaaacaaatcttttccggagacttgcacactcacgctacgcctctgaccaataataactcacagaaatctgacggatacacattcacattatccgagacatattgtgatacacagaacttttatgtcagtgtccagattacatctgaagaaggttttccagaaagccaacgagcacaagtggatccagatggtatttcttccctttatctgatgggaaaatggaccgattccagctttcctgaaaattcttacacacaaggagtttccctctctggaacattttctgatgatcacacatttatcggttcatttcatcagatacttggagaaaacactccaaaagatacgtatagcgcagaatggaaaatttctggaattcaatacagtcccgaggaagctaaaaacggaaatatgtatatctatttttccgaaccgcttgaatttcagattgaaactcctgtccaatcagacggtactgtaaaaaaattactgaacgaaaaactgccaaatggaactactttgatctccgccacaaaaacactgactacaatttctctggaatccaaaagtaacgaagaaatggaacaaaatagtactgacacactgttatcaccatttgaacaatatggctatgctgtttacgatgcaaacggaaaacatatgacagataaaaccggacttattgcaattcaagatcatgatgtttctaaaattcaaatttgctattttaaacttcctgtaaacccgaaccgggatgttaacaatcaacccgaatatgaagaatttcaacaatctttccgggagagtggttattcctacgatatgatcaaagaccgcattgtaaaacaagttgaaattgtatttgaagaataacatttcatctaagaaaatcctgctgagagtttcataatgactcccggcaggattttatacattctgtgtatatctgcacttcggaaaatttccacatccccagaattcaccatatcttccgtttcttcgaatcatctctccaccacatttcggacaaacaaacacttccgattttttctgaagctttgccatctcctcaaaacacttctgattcatcacacagtcatttaaggcccggtgcgcccctttcgaactgattccaaaatgctcagcgagatctgtcagtcgatgatgtttcaattcaggaacgcattttcttgccatatgcaaggtgtcaataaagtcattcgagactgtctcctgaaataattcttccacttcccgataaataaatttcatatcaaatgactggatattatgtcccaccagaatgtcctctcccacaaaacgcaaaaactccgtcattgcttcgcggatcagtggcgcttctgacaccatttgatctgtaattccatttactttcgtagcctgcgtcggaatatgtctcccaggattcaccaacgttgaaaatgtatcctgtacaacaccatttctcacctttactgcagatatttctataatatcatccatatttgcactgattcctgtcgtttccagatcaaatactgtataatccggtacatattgaaccagacggtttcctttttctctcatcttctgtaatactccttttgtgcttccgtagatttacatatagaaaaaaacaacaccaaccggtgctgcctctcattccatctgtatttcctatacattcaaaactgcatacaaagaatc

SEQ ID NO: 552 - DNA, 27042 bp, Ruminococcus gnavus
  source 1..27042: mol_type = genomic DNA
acgttttattatccgtattttgaaagggacagttctcgtagagggaattggagctgtgttatttgcattttattttgtgcctgagtatggatttatcaggggactggcatatggggtcttccattctgtgtccgcattctgtaatgcaggaattgatatattgggcaccaccagctttatggaatatgttaagtcaccgctgatcagtctgacgaccatgtttttgatcgttgcgggaggactcggattcacagtctggcatgatgtgcgaatgaacctgcaggatgtggcaggacagaaacgccccttaaaacgcttgtttacgagattgcatcttcagtccaagatggtgatcgtcatgacagcgggattgatcatgataggaacgctgggatattttctgctggagtatcacaatgatgcaaccatcggaaagcttggatttggtgaaaagcttctggcatccggatttcagtccgtgacgacgaggacagctggatttgctacagtttctcaggcagaactgacttcggcatccaagttgtttggatgtattctgatgtttatcggaggttctccgggaggtacggcgggcggtatcaagacgacgacaatggccatcttgctgctcacctgtgctgcagtgatccggggaagaaaatcaacagaatgttttggaagacgtcttgcagaaaccaatgtgcgttccggaattgcaattgtatttctaacatttgcaatctggctggtcgggttatttggaatcgcaattttggaaccggatgagagatttattgatttgatatacgaggccacctctgcaattggaacagtggggctttctgcagatctgactccagctctgaccagaggaagccatgtgatcctgatgattctgatgtatgtaggaagaattggaccgatcacgatggcactggtattttcgggaagagaagatatgcaggcaaaattcagggatttgccggaaaaacggattatgttaggatagaagaggtagaaagacatgaaaaaacaatttgcagtgtttggattgggaagtttcgggcggagtgttgccctgacactggaaaatctgggatgcgatgtagtggtagtagataaatcatatgaaaagatccaggagatttcagatatggtctcttatgcgatgcgggcggatgtgtcagatcccgatgcacttcatgcactggggggaagaaatctggacggagcagtcgttgcggtctctgaaaatctggaagcgagcattatggccacgatcatctccaaagagatgggaatcccgtatgtgctggcaaaggcgaaagatgagctgcagggcgcgattctcgaaaaggtgggggcagatgccattgcctatccggagtgtgacatgggagaacgagttgcaaaaagcctgatgtctactgcgtttacggactggatcgagctgtcgtccgaatacagtatggcagaggtggcaattccggaaaaatgggtaggcaaaagcctcagtgaattaaaaatccgggaacagtacggaatcaatgcagtcggaatcattcagggagagaaggtggaggttaccctggatccctatgcaccgcttccgaaagatgcaatcctgattttgatcggagcaaccgctgttctggaaaaatttcatacatggaagtaggaaagatgatcacaagtacaagtaatcaaagaatcaaagaattatctcaaatacagaaaaaaagcaaggtgcggagccgcgagggagttttcgttgcagaagggatccgcatggtgagggaaacgccttatgagcgtcttgtcagcctgtatttttcggagagttttgaaaaaaaatatggaaatgaagtattggatgcaatttccgggggagatttaaaaatccgggagcagattcggagaaagacggagattttgtctgatgcggtattttcttatgtgtctgatactaagacaccgcagggagttctggcagtggtgcgtcagatggagtatacactggagcagatgacagatggagttatcccgcatctgatgatcttagataacctgcaggatccgggcaatctgggaacaatctttcggacagcggaggctgccggagtgacaggtatcatcatgagccgggactgtgtggatatttataatccgaagacgatccgctcgacaatgggggcgctttaccggatgccgtttgtatatgtggaggatctgagagaaacgatccatacattaaaagaaaaaaacatcaaaagctatgcggcacatctggatggaaagaacacctatgataaagaagattacaggcagggaacggctttcctgatcgggaatgagggaaacggactcagagaagagattgcacagtgtgcggatacctggatccggattccgatgtgcggacaggtggagtcgttgaacgcagcagtggcagcgacagttctgatgtttgaagtcagcaggcagaggagaggataaaccattttcagaaattgacaggggtgataggatggaaccattgttagatctgacaaaagaatatggtctggtgctggatggcggcggagcaagaggggcctatcagatcggtgcatggacagcgcttgaggaagcaggcgtgaaggtttgtgcggtggcagggacttctgtaggagcattaaacggtgctctgatctgtatggacagtgtggagaatgcacagaagatctgggcagagatgaagttttccagagtcatggatgtggatgatgagtggatgcagcatctgtttagcaaagatggaaaattaaaagaagtactctctgaactctggaaaaaactctcagatggaggtgtggatgttacaccgcttcgaaatctgatccacgaagtggtggatgaagagaaaatccggcattcgggaaaggagttctgtcttctgacattttctgtgacggatatgaaagagatggatctttcgctggaagatattcccgaaggtactctggaagactttttactcgccagcgcttatctgcttggatttaaaaatgaaaaactgcagggaaagcgttatattgacggaggcgtgatcaataatgttccgttgaactctctgctaaaccgcgggtataaagatattatcaccatccggatccacgggccgggaagagagccgcgggcaaatatcccggaagacggagaagtttacgagatcagcccgagagtgcgtctgggcagtattctggaatttgacagcaaaaggagcagacagaacctgaagatcggttattatgatgcaaaacggatgctctatggtctggaaggatttatgtattatctggagcagacccatgaggagacgtggtatgaggacagattgtgcgagattccggatctggagaaagccgagatggcatttgtactgaagcttcccatcgggtgttctgccaaagagttgtatctggcaatgctggaggcaagtgccaagctgcttcgcattcccaaatatcagatttatactgtggatcagctccgtgatctggtacaggcacattatgagaaattggaagatcagatccatcttccgggatttacacacacattgattcagatagaaaggaatagaactatgaatttaaaaggaagaaattttttgacactcaaagattttacaccggaagagatcacatatcttctggatctggcagcagacctgaaagagaagaagaaaaacggcgaaccggttgatttctataagggcaaaaatgttgcactgatctttgagaagaccagtacaagaacacgctgtgcatttgaagttgcggcacatgatctgggcatgggttctacctatctggatccgactggttctcagatcggaaagaaagagagcattgaggatactgcaagagtactgggaagaatgtatgatggaatcgagtaccgcggatatgggcaggagattgtggaggaacttgcaaaatatgcaggggttccggtatggaacggtctgaccaatgaatatcatccgacgcagatgttggcagatatgctcacgattcgtgagaatttcggtactttaaaaggtctgaaactggtgtacatgggtgatgcaagatacaatatgggaaattctctgatgatcgtctgcgcgaagctgggactggattttgtggcttgtacaacagaaaagtatttcccgaatgaggaactggtagagacatgccgcggatatgcaaaagagtcaggagcaacgatcacactgacagagaatgtagaagaaggaacaaaggatgcggatgttatctataccgatgtctgggtatctatgggagagccggatgaagtctgggaagagagaatccgtgaattgtctccatataaagtgacaaaagaagtgatggcaaatgcaaaagagtctgcgatctttttacactgcctgccggcattccatgatctgaagacaaagatcggaaaagagatgggagaacggtttggcattacagatatggaagtgacggatgaagtatttgaatccgcacagtccaaagtatttgatgaagcagaaaaccggatgcatacgatcaaagctgtgatggcagcgacactgggagagatgtaattgaaagcggaaattttaaaaatgctgcgggagagtcaggactatgtttccgggcagcagatctgtgagcggttccaggtatccagaactgcagtctggaaggtgatcaaacaactgaaagaggaagggtatgaagtggaagcggtacgcaacagagggtatcgcctctcttctcttccggatattctctcccgggaggagatcgtcagtcagatagatactgtctgggcaggacaaaacgtgtattattttacagaaacagattccaccaatattcaggcgaaaagaatgggagatcagggggcgcctcacggaactctggcagcagcaggacagcagactgccggaaaaggcagaagaggaagaacctgggagtctccggcggatcagaatatttatatgtcacttcttttgcgtccggagatcgcaccggtcaaagcacccatgctgaccttggtcatggcatatgcggctgcaatggcgcttcgggaatgtacgggtctggatgtacagatcaaatggcccaatgatctggttatcaacgggaaaaaaatctgcggaatcctgacggaaatgagcacagagattgattatatcaattatgttgtcattggaatcggaatcaataccaatattgaacaatttccggaagaactaaagcagactgccacatcacttcggattgaagcaggacgcagtatcagacgcagtccactgattgcggcgattatgcggtggtttgaaaaagcatatgccgaattcatggaaacggaagatctttcgggaatccgaaaagcatacaatgaactgcttgtgaattgcggacgtgaggtccgggttctggagccaaagggagaatggcaggcagaagctcttggaatcaatgacggtggtgagctgcttgtaagaaaagtggatggaagtgaaacagcggtctatgcgggagaagtttccgtgcgcggtatttacggatatgtttagtcatataagaaaggaaactgaaaatggaagaagaaattgtgctttgtgcggcgaactcttatgagcagaaatactatctgaatcccgagtttgaaatgctgcctgaaagtatcaagcaggaattgaatattatgtgtgtactctacacagaagatgtaggcgggatcttgatggttttctatgatgaggatggaaatctggagtttcgggtagatcacgaggagaatgatttttcgtttgatgagatcggcagtgttttgaagatcaaacagctgcagcagacaaaacaggagctgttcgagtcactggaattgttttataaggtgttttatctgggagaagaggttgatctggaagaagagtagagtacagatcctgagaaaagaaacgagagaaagagttagagtgtgaaaatgaaacagttgaaaataggaaatgttttactggaaaattcttatgtactcggacctatggcaggcgtgacagacctgccttttcgcttgctttgcaaagagcagggagcgggtcttctgtgtatggagatggtcagtgcgaaaggtattttctataataataagaatacggaaagtctgcttcagatccatcccgaggaagtaccggtatcgctgcagttttttggttcagatccgaagatcgtcagcgagatggcgaaacgggtcgaggaacgtccgttttccattctggatatcaacatgggatgtccggtgccaaaggtcgtgcgaaacggagaagggtctgcactgatgaagaatccgaagctggtatacgaactggtcagtgcgacggtaaaggcgatcaaaaagccggttacggttaagatcaggaaaggattcgatgatgaacatatcaatgcggtggaaatcgcgaagatcatcgaagaagcaggtgcggcagcagtagccgtacatggaagaacaagagaacagtattattctggaaaagcggattgggagatcatccgtcaggtaaaagaggcagtttccatcccggtgatcggaaacggggatgtgacttccggagaaaaagcaatcgccatgcgtgagcagaccgggtgtgacggggtgatgatcgccagaggcgctcaggggaatccgtggatcttttcagaacttttggaatatgaaagaacaggacggcttcctgacagaccggatgtggaagaaatcaaacagacaatgcttcggcatgccagactccagatcgagtataaaggtgattttacaggaatccgggagatgcgcaaacatgtggcgtggtatacaaaaggactgtatggggcagcccgtctgcgggatcggatcaatcaggttgagagctatgcagaactggaaaatctcttgacatcgttataacgattgagtataatattgaaattgtgaaatatacttgaattagagatatggacaggcagaaatgtcctgtaaatacaggaaaaagccgaagataaagttttaaataaaagagcaagatcaggaaagaaaggaagcagacaggtatggcagaggcaaagaagagattacttacttatgcaggattgaaagcgctggaggatgaactggaaaatctgaaagttgtaaaacgtaaagaagtggcaggaaagatcaaagaagccagagagcagggagacctttcagagaacgcagaatacgatgcggcaaaagatgagcagagagatatcgaagcacgtatcgaagagctggaaggcattttgaaaaacgcagaagttgtagtagaggatgaagttgatttagataagatcaatgtaggatgtaaagtaaaagtatttgacatcacatttgacgaagagatggagtttaacattgtaggttctacagaggcgaacagcctggaaggaaagatttccaatgagtcgccggttggtcaggctctgatgggtaaaaaagtcggagatactgtagatgtagaaacacaggcaggagtgatccagtacaaagtacttgatatcagccgttctatgtagtagaaaccagacccctttattacaaggggtcttaattcgcatttagggaacacataaaagtgtaccggatgcccgaaaaggaaggagaaaatatcgtgtccgaacagcagaaaaaagcacagcaggaaccagatttaaatcagttgagaaaagttcgccgcgaaaaactggcggatttacaggcaaacggaaaagatccgtttgtgatcacaaaatatgaccagacacatcacagtctggagatcaaagagaattttgaagagcttgcaggaaaagaagtttctatcgcaggacgtatgatgtccaaacgtgtgatgggaaaagcatctttctgcaatgtacaggatttgcagggaaatattcagtcttacgttgcaagagacagcatcggagaagaagcttacaaagagtttaagaagatggatgtcggcgatgtgatcggaatcacaggagaagtgtttgagacaaagacaggagaaaaatccatccacgcttcttccgtgacattgctctccaagagtcttcagattctgccggagaagttccacggactgacaaatacagatatccgctaccgtcagagatacgtggatctgatcatgaatccggatgtaaaacagacatttatcaaccgctctaagattttaagcgcgatcagaagatatctggacggacagggattcctggaagtagagacaccgatgctcgtatccaatgcaggaggagcagcggcaagaccattcgagacacacttcaacgcactggatgaagatttcaaactccgcatttctcttgagctgtacttaaagagactgattgtcggaggaatggagcgcgtatacgagatcggacgtgtattccgtaacgaaggtcttgacacaagacacaatccggaatttacgttgatggagctgtatcaggcatacacagactataacggaatgatggacctgacagagaatctgtaccgtcatgttgcacaggaagtacttggaaccactgtgattgagtataatggtgtgcagatggatttaggaaaaccgtttgagagaatcacaatggtggatgcagtgaagaaatatgcaggtgtggactggaatgaagtggagacactggaacaggcaagagagcttgcaaaagagcatcatgtagagtttgaagagcgtcacaaaaaaggagacatcctggcgctgttcttcgaggaatttgcagaggaacatttgatccagcctacatttgttatggatcacccaattgagatttctccgctgacaaagaagaaaccggagaatccggaatatacagaacgtttcgagttctttatgaatggatgggagatggcaaatgcctactctgagctgaatgatccaatcgatcagagagagcgtttcaaagcacaggaagaactgcttgcgcagggagatgatgaggcaaacacaacagatgaagatttcctgaatgcattggagatcggtatgcctccgacaggtggtatcggatttggaatcgacagaatgtgtatgctgttgacaaacagcgcagcaatcagagatgtgttgctcttcccgacaatgaagagcatgggagctgcaaagaatgaagctaacaatgctgcacagtctgctccggttgaaaaaacagtggaaaaagcgattgctgaagtgaaagaaacatacgatttctccaacgtagaagtggaaccattattcaaagacatggttgatttcgaaacattcagcaagtcagatttccgagctgtaaaggtaaaagaatgtgaggcagttccgaaatctaagaagcttctgaagttcgtattagacgacggaagtggcgaaaatcgcgtgattttaagcggtattcacgattattacgagccggaagaactggttggcaagacattacttgcaattacaaatcttcctccacgtaagatgatgggaattgattcttgcggtatgattatctccgctacacaccttgtagaaggaagagaaggactcaatgttctgattctggatgataagattccggcaggagcgaagttgtactaagaaagtaagaaatcttcacaatttgacaacaaaaattctttttgacaacaatttgacaacaaatttgtattcaaacatgaatcatcatgaagaatggtgattagttgtcagtaatactactccaacaatatgaattgttgagggcactttttgaaagaaaaatctttcagagagtgccctttttttactttataggaaagttcgatatttgttagattcatgaatgaaaaaagcccgcataaaagcgagcatgataaagagatggcactggttaaaagatataaaaaccttctacaccagcctcatcggaaaataagtcatcttcatttaagaaataatccatatccagaagttcatcttcgctcatattgcgaatgtcctcagatgtgaatccttccggtggatgatccatgtattttttgcgtaattcctcgatattaggtttcatgttcttgtcctccttacagaggattatagcatagaatataaaaaaagaaatcatgcagaagaacgttttccgagagagttggacattactttctcatagagttcttcgagaggtacgcgtttgtgtttgtaataaagttcaagtaacaccattttgtgtttgcaatcgggacattctaaaggatcatagccaaaggagagcaggatggcggtcctccattgattgaaatttcgataaatacgatgcttatttttagaaatcgcacgaaaaagggttttatcgatttccctgtgtctggcatataagccgccatatcggatcattttgaagtgtttctcggggatatggcggattaatcttttgatgaaatcaatggcaggaagagtttcttctatgtatttattatcctcatggcgattgtaatggaaagtaacagtatccccatcatagttgtcgattctggatgtagcaatgacaggacggccaagataacgcccgatgtatttgataacgttcttagggtcacaaagattcggttttgcataaacgtagaatccttgtttatgttcacggtaacatctggatttcacctttttaaacgaaggaccaatgatcgtctccatttcattcagtagagcggtatggaaggcattgcgaagaaagttgtagttaaaatatttgacatggcgccagaaaccatcatcgctaaatcccccttccgagatgagacagtgaatatgagggttccatttgaggtctctgccgaaagtgtgtaaaaccatgataaagcctggggtaaagtttttggatttattcagttgaaaaaacatacgagagatgacactgttcaccgcgtgaaaaagacagttgagcagagaccggtcattgagaaaggagtccctgagattttcatcaatggtaaaaacgcaatgtcgatgattcacattcacgagtttaaaagacatactggtagtgcgttccatggcatatttattgccacaggtaggacaaaaacgactgtggcaacggaaagggacaaatttccaatttttacaatgtgtgcagatatacatggcgccaccataggaaggatcgccacagttaattactttttcgatgttttccattacaacaggtcttggttttaaatcgtattcaattatttcataataatctctgagcatcttctgtatcacattcataagattattatgaaacaaagtaggagagaaagcaagcccttacccctcaagattgaggggcgggggagcggagatgccgtaggcatttttttatatcataatttaccaaaacgttgttgatttttaaaaatggaggtgttagtatataaataccaaaacgttttggtaacaaatactgtgtaatataaaaaaagtacacagtatgataccaaaaaaattaagcgaaagagaagacatggaggaaaatatgacggtaaaaggacttatttttgatctggacggggtaattgtatttacagatcagtatcactataaagcctggaaacaaatggctgacgagaaaggtatttattttgatcaggagattaataacagactgcgaggggtaagccgtatggaaagtctggaaatcattctcgaaaggtatgagggagagccgctgagcgatgaagataaacagaagatggcggaggagaaaaacgagatttataaaaaacttttagaacagatgacaccggcagatgtcagtgacgaggtgaaggaaacattggatgaactgcgtaaaagagggtatctgctttcaattggttcatccagtaaaaatgcgaaatacattcttgaaaggaccgggatcatggataaatttgatgcggtttccgatggaacaaatatcacaagatccaaaccggatccggaagttttcttaaaagccgcagagtttttaggtttaaaaccggaagaatgcggtgttgtggaagatgcgtatgcgggaatcgatgcggcagtttcaggacacatgacatctatagcaatcggtgacgcagcgggttatgacaaagcagattataaactgtcagcattcagggatctgttggacatcgcaaaataggaacgtgacacatgcattcctcatttttacagatggaatataatggaaaaatgtgataagatagatattaatttgtggaaatctgataaatcgggggaggttgtatggataagcaggaaaaagaagttctggataagaggacgacaatccatgacgttgcacatgaggctggggtatcgacgactacggtatcccatgcactgaatggatataaagatgtaaatgaacagacaagacagaagatcatggaaattgcgaggcgtctggattatatgccggatgaggcaggacgctcactgagagggatacagaagaagaagattgcactgctgatcgcaggagatctgccggaggaagatccaagcggcatcacgtatggacttacaagcggaatttacaaggtggcacaaaaaatggggtatgaatttacaatcctgacaatgccgtccaataaacagttgaaaataagctttggacagatctgcaagaggaagaaattaacggggattatcgttttcgatcttgccatggacatgccgtattatgagcagatcaaaaacagtgagatcccatgcgtccttgtggatataaccatggatggcgataatgtaagagaagtttccgtagataatgagaaagcatccttcgaagaggtcgagcatctgatcgagaatggatactgcaacatagcaatgctttccggtaataaaatggcacaggtgtcagaacgaagggaaagcggatacaagcgtgcattagagaagcatggtttccgcgtcagggaagaatggatcgtggactgccagtttgaccaaagtacggcaatgcagaaagcaatggagctaaaacaccgctatccggagattgatgcatttttctgcgcaagcgacagtattgcgatcggagcgatcgatggtatgatacagcttggaatgcgggtgccgcatgatgtggctgtcgctggctttgacgattttactgtttcaaaatatatccatgggggaatcacgtctgtcaaacagtatccatatgagatgggagtagcctgtgccaatacagttatcagcatgattgatggaaaccgtgtaccggactggatacctatggaatacaagctgatgaaacgcgcatcaacgaaattaaaattgtaagaagtatacaaattatacaacaaaaattgttaaatatgacgaaaaaaataaaaaaatacacaaaaagcttgaaatccaaaaggttttggtatattgttaactcaacagttaccaaaacgttttggatttttgctttttacacgtttatcactaggaggaaaaagatgaaaaaaagagttttatcaattttacttgtagcagcaatgacagcttcccttacagcgtgtggtggttcagacagcagcaataacagtgcgtcgggaagtggtgagatcacacttacaatcccgacccactttgtaggagagaatgttggcgctgtatattttgaacctgccgttgagagatttaatgaggcaaacaaaggaaaatatcatattgaattagaagaagtcgttgaggcatcttatacagacaagatcagccagttggcacagtctgattcacttccggcactgatccagacacctgccaaagaatggatccagacagcaatgattccgggaaaactgtattatccgatgaacgattttctggatgaacatccggagatcaaagagctttgtgtagattcttctgtggaatattgtacacaggagaacggagatatcatcactgtgccggcgatcacactttctaacacgggtttatactataactcagcactgtactcaccggagaaaacagtttcatccatgacaatggatgaatttatcagttctcttggtgacaacaaaattgcgctccagacagttgacaatgcatggacatcagcattgttattaacggcattgatcgcaaatgaagatggcggtaaagaatggcttcaatcgaatgaaggaaccaaatgctacgattacacagagccggcattcgtaaatgctgtaacaaaattaacagagatctggaaaacaaatgcatcctctaatgcagttggtgcagcatatgcagacgcagccaatgcattcatgtctgatcaggcagccgttatctgcaatggtccctggatgaactctgaattcgtggacagtgcttctgataactggtctaatggatttaatggagcggatgtaaatgcggattattatcctggtaatgtgtcaatctgtgatacaaaagtatttggcagatggacgcttaccaatggtggtacggatgaagagagagaatgtgcagaagcatttcttgcatttatttattcaaaagatgagttagagacatttgcacttgcagagggatggcagataccgaatcttacctatagcgatgaatttctttcgaagttagatgaaaaaccattgataaaacagcagatcgagttactgacatctgatacaaatatcgttcctaatgtattaaatattatgcctgattccgtatcatccagtgtatttggaaccaatcttgtgcagttagtaaatggacagattactccgaaagagttctgtgagactcttacaacaaaagccgctgaagctggtgacgaataatcgatgaaatcatggagggggaatcatttgcggacaaattgattcccctttttctttcagaagattgccttctggacgcggaatgtatctgaaaataatggatatttctgaaaggaaaggaaatattatgacaaaaaagaaaaaatacggaaaagtgcaggttaaaaattttaaatggatttacgcattccttcttccgacaattattatatttgtgatgttttatgtacagccgatcgctatgatgcttacaacatcatttacaaaatgggatggatttaatgatccttcttttaatgggatcagtaactatataaaactctttaccaacagtgcttctgcagtatcgatcaaaaacctgattttatggtcggctattgcaatgacgttccatgtaggatttggtgtgctcacggcatttgttttatatctgcaacctcacggatggaaattcacacgtgctgtatttatgataccaaatattatttcagcagcagcgtgggcattgatctaccggtttattttcaatgaccagatgggtgttttaaactcagtgatacgtgtatttgataaagatttttcggcgcagtggttctaccagagtccatatgcattctgggcagttacccttacgtggctgttttatgcagttattgtcacattgatcgtattgaatgatttaatggcgattccaaaagaactgatcgaagcagcaaaacttgacggagcgaatggatggcagctgatccgtttcgtggaacttcctctttgccggatctccataggaaccggaatgttatgttctatcacatcacgtatctccatgtatgaagcgatcgcacttacgacagccggaggacctggtgatgatacgatgagtttatctgtactgctggtacgtgcgatcacagattacaactacggatttgccaatgcgatcggtgtgatcatgttccttatcggtttactgattatgtacattgtaacaaaggcattccgtatgaatgattcaatctactaggaggaacaatcatgaatgtgataaaaaaaatattaacaaatatcctgatttatggaacagaattcattgttattatgctgagtgtattcccaatcgtatgggtggcattatcctcctttaaaacgaatgcacagattctggagggaccatttacactgccaacaggtattacaacagcaaaagaggcatacacatatctgttccagaaatatgatttctttagttattttggcaattcgctgatgatatcgctgatatctacggtgatatccctggtttgttttgcaatggcggcctatgtattggcgaaatatgagttcccgggaagaaatcttatttttgcactatttacaattacaatgcttgttccgggtcatgcaaaagcacagccgattttttcgctgatcaattccatgcatctgtatgataccaaaacaggtttgatccttgtatatctgggaagcggtattgcaatgtcgattttcattttgaaatcggcatttatgggagttccaaaagaattggatgaggctgctacgattgatggtgcagggtttttccgtacattttttatgatcaatcttccacttgcgaaatcaggtctctctaccgctggaattttaatgtttctcggcaattggaatgaatatttctatgcagcacttcttacatcatcagagaagaacaggacgctgccggttgcattacagttttttaaccagtcattatcgtacgattacacgaaaatgtttgcggcactcacactcgtagtggttccggcaatcattgtatattgctttgcacaggagcaggtacaggaatctgttgctgcatccggaattaaaggttaataaaggagaatgaagctatgtcagttatgaattacagaaaaggaacaggggcagagacaagctggatcattgaggagaccagctttcatgagaaatatactggaaaatgtgagtccatcttcacacaggggaatggttatttaggcctccgcaattcgctggaagaaagatatgtggatactgtcaggggtatgttcatcacaggaacattcaacaaagcaagcaaagaggaagcaactgaacttccgaatgtttctgatattgtgaatatggaaatcgaacttaatggtgaacgtttttccatgacagaggacaatctaaaagagtattcaagaacattaaatctttatacgggggaaacctgccgtaatgtcctgtgggaaggaaaaaacgggaatgtcgtgcagctgtctttccatcgttttgtgtcttataagaacgtacatgtgatcggtgcatatgttgagatcaaacctgtaaactgcgacgtaaaagcaacggttgtgagcggaatcaacgcacaggtgaccaataatggtgcccagcatctcacggaagtatcaaagcgtgcattcgatgaaaaatatctgcagatgggaatggtcacgacagaatcagaagttgtgatcgcagtcagtactgttcatgacgtatttttggatggagagaaaacagaggagaccgcatataagatcgtagatgacagaagaaagatccatgcgaagatccaactggatatcccgaaaggagagacggcacgtgtagagaaaatctcaacggttcattccagcagggatcttgagtatacaggatcgggaaaagagccggataaagagacggtatatgcaaatggactggagaacttaaaggaagcagaatgcaagggataccggacactcctgcaggaaagcagggaagtctgggaagcaatctggaaaaaacaggatatcgtgatcgatagcagggaagacgatgcgcaggtggctgtccgctttgcattatatcatcttcagatcatggtgcggaaagaagacaaccgggttggcataggagcaaaggcactcagcggagaaggctacaagggacattcgttctgggatacagagacttttattttcccgtatttccagatggcagagccggaagtggcaaggacacttctggaattccgttataagggactgtatggcgcaagaaagaaagcaaaagagaacggctataaaggagcaatgtatccatgggaagctgcgtggatcagtgatggggaagtcacaccatatatcactggagtaaatgtacatacaggagagccgctgatctgcctgaccggtgtgatagagcagcatatcacttcggatattatttttgcattatggcagtattatacagcaacaggcgatcaggatttcatggacagatatggatatgaaatgataatcgagaccgcacgtttctggaacagccgtctggagtggattgaagaaaacaacagatatgaaatccgtgatgttataggaccggatgagtacaaagaacatgtggataataatgcatatacgaattatatggcacatgaaaatatgagactagcagcacaggtaattgcatgcatccgtgatgagaagaaagatatctacgggaaaatgcagaaattaatgcaggaagagggtacatcattagaacagttagaggaagaactgaaagataaaatgaagaaactttatttgccgcagccggatgaaaaaacagggattattcctcagtttgacggatactttgatctaaaagaaatagatctttctgtgtataagaatgcttctgttgtgggaacggtctttcatgattattcaggggaagatgtacagaaaatgcaggcaggtaaacaggctgatattgtagaactgctgtatcagatggaagatatcacaacaccggataataaggcaaagaactatgtatactatgaagcaagaacactgcatgattcatctctttccaaggcgatccacagtatcactgcatgtgaccttggtatggagaaagaggcttatgaaatgttcatgagtgctgcacttaccgatcttggacaggagatgaaatcctcggatgcaggaatccacagtgcaaatatgggaggtgtatggcaggatgtggtcatgggattcggaggagtaagaatccatgacggacatctccgtatccgtccaaactgtccaaagcagtgggaaaaatttacatacccgatttattggaaaggaaataaacttgatgtcacagtctgcaaagatggagtggaagttatcaacgagggcacagctttcatggcagagatcatgggacagatggttactgtagaaaaaggaaaaaacgaatttttggcataagaacataggagagaaaaatgctgcagaaagatggaaagtttgtcaaagtattaaaccggatcgcagatctggttggattaaatctgttagctatcctcttttgtattccgattattacgataggggcatccataacagctgtttatggatgcatctttcgcatacaggaaaaaagagagggatatctgacaaaggatttttggaaattgtttaaagaatgtttcaggtcatccacgatcatttaccttgtgggtgttgcagtcgttgcaatgttatatctggattatcagatttttgccacagacagcagactggacattttgcaggtacttgtggtcgctggcgggatattagtggcagagatttttacttatgcgtttccgatggagtcttactttgaaaacagcctgaaagcgaccgtaaagaatgcgttattgcttggaatatccaatattccatacacgctgctgatgctaggcataaatgtttttccatttttcttggttgccagaattccagttacatttggaatatggtttttgatcggcatttcaggggttgcatggatcaacagctttttcttaaagaagattttttcaaaagtcaggatacgaaaggatgtataacacatgatgaaacaacagttcatatgcgatagaaaaccaaaggcaagaccggaaaatgtgatcacaggagcaggatatcgaattacatttctgacagacaggctggtcagatttgaatatgacagatccggtgaatttgtagatgatgcatcccaggtgatctggtacagggatcttgaggatgttccgtttgagataagacataaaaaagagtatatggagatccagacgaaaagcttacggatacggtatgatggaaaaccatttgaagaaagtatccttagtgtgaggttgagaaaaccggacaacggatgtgatctcgaatggtattatggaaagaatgaagaccgtaatctttttggaacggcacgcacacttgacgaggcaaatggcagcatcccgctggaaaaaggcattctttccagagacggatttgcagtgctggacgattcaaaaaccattctgctcacagaagacggatgggtgaaagagcgaaagcagacaggagaggatttttatctgtttgcctatgggcatgattaccgaggggcggtgagggatttcctgagagctgcagggcgagtgccgatgctcccgaaatatgcactcggtaactggtggagcagatattatgaatattcacaggaagagtacaaaaaactgatggatcgttttttgaatgaagaaataccgttttctgtagccgtcattgacatggactggcatataacagatattgatccgaaatacggctccggttggaccggttatacatggaacagaaaactgtttccggatccaaaagcatttgcggatgatcttcatgacagaggaatgaaagtgacgttaaatgtccacccggcgcttggcatccggggaagtgagagcatgtatgaagagatggcagaggcaatgggagtggatcctgcaaccgatgaaccagtcgagtttgacatcacaaatccaaaatttttggaaaactattttgagatcgtgcatcacccacttgaggaggatggcgtggatttctggtggcttgactggcagcaaggtggtcatacagcagtgaaggggctggatccactatggatgttaaaccactaccattatcttgacagtggccgggatggaaagagaagaatgacattttcacgttatgcgggacctggttcacacagatatccgatagggttttcgggagatacagttgtgacgtgggagtctctggatttccagccttattttacagcaacagcatccaatatagggtatggttggtggagtcatgatatcggtggtcatatgctgggaaacaggtcagatgtcatggaggcacgctggtatgaacttggcacattttcgccggtcaaccgcctgcacagcaccaaaatgtcattcagtgggaaagaaccgtggaatttcagaagcgaggtggaacaggcaatgggagaagccctgcggctgagacatcagttactgccgtatatctatactatgaattatctggcatacaaagagtaccgtcctctgattgccccgatgtattatgattatccggaaaatgaacaggcttatccggttcgggaactttcgtttgtggaaggagtaagcaataaccagtatctttttggaaccgatatgatggtcgcaccgattacaagtgaccagattgatattttgaatcaaggaaaagtaaaggtatggataccggagggatgttatcatgatttctttacaggactgatctataaaggcgaaaaagtactgtggatgttccgtgacctgaacagtataccggtgcttgtaaaggcaggagccatcatcccaatgcagaaagaattgtttggaaaggattttctgaagaatccggatgaactcatcataagagtctatggtggagaagatggacactatacacattatgaagatgacggagagacagaagattacagggatggaataaattgctgttttactgaaatgcgttttgattgggaaaacggaatatttacgattgaaggtgcaaaaggacagaaagatctgatcccggaaaaacgtgcatatacgatcgatctgtgtggggtaaaggaatcggttcctaaactatacgcaggcgggaaagaagtggaagtcaaatacgaatatgagccgaagatgggatgtgtcagaatccatattccgaaagtgtcagtggatgaaaaacttgaagttgtttttggacagaaactggcgttaaatgacaatcatacatttgagcgtgtgtatgacctgctgaatcaggcgcagggcagtaatctggcaaaagagtctgcataccagcttttaagaagtggaaagaatctggcagatatcttaggagaacttgaaacgacgaatttagacaaagagatcggacaggcagtcatcgagatcatgacggctgatttgtaaggagaaatgaagatgcagaaagcatggtggaaagaagcagttgtttatcagatttatccgagaagttttatggatagtaatggagacggaattggagatcttcagggtatcataaaaaaattagactatttaaagaatctcgggattacagttatatgggtatcaccgatctataaatcgccaaataaggataatggttatgatatcagtgattatcaggatattatggatgagttcggcacaatgtccgattttgatgagttattgaaagaagttcacagaagagatatgaagcttgtattggatctggttgcgaaccatacatcagaccagcataagtggtttctggagagcagaaaatcaaaagataataaataccgcgattattatatctggaaagatccggtagatggacacgagccgacaaactggggttcctatttcagcggatcggcatggcagtttgatgagacaacaggacagtattacctgcatcagtttgttccgggacagccggatcttaactgggataatcctgttgtcagaaaagaaatttttgacatgatgacatggtggtgcgagaaaggcattgatggattccggatggatgtgatcagcctgatcagcaagccggaagtatacaaagacggaccggttgcacaggatcagaagtattctttctgtggggcgatcacagcaaatggggcacatgtgcacgaatatcttcaggagatgaaccgggaagttctgagcagatacgagcttctgacagttggcgaaacttcatgcgtcactttggaggaagcaaaaaaatatgcaagaagtgacggaaaagaactgagtatggtattccagtttgaacatatggatgtggattcggataaacacggaaagtggacggataagaaactttatcttccggatcttaaagagatcctgaaccgctggcagaaaggattagaaggcgttgcatggaacagcctgtactgggacaatcatgaccagccgagagttgtttcaaggtggggaaatgattccgaagagtacagggagatatcggctaagatgctggctacctgtctccatatgatgcagggaacaccatatgtttaccagggcgaagaacttggaatgacaaatatgcgtttttcggatctgtctgaatgcgatgatattgaagaaaagaatatatatgtagatcttgtcacagatgcaaaggtgtacacacatgatcagatgatggatattatcagcaggaaaggacgcgacaatgcaagaacaccgatgcagtgggacagctcagaaaatgcgggatttacgacaggaacaccatggtttggtgtcaatccgaattataaaacgatcaatgcagctgcgcaggtagaagatccggagtctatatacaattactataagaaacttatacaattgcggaaacaagaagaagtgatcgtatatggaacgtttgatggtcttgaagatgcagatgaaaacttatacgtttacacaaggactctgggtgataaaaaattactggtaatctgtaacttcacagagaaggaactggatgttccggcttctctcgcagatatggtgaaagaaaatcaggggattttagtggggaactataaagaaagttcagaaaaaatacgcccatacgaagcagtggtatattgggtaaaataagaaaataaccattttgcggggattacaggtatgcagggaatgataagagaaaaagatgatttttaccagaagatgttccggttgtcgataccgatcatcattcagggactgctcagtgcggcggtgaactccgcagatgtcattatgctcaattatgtcggacagtcttccatttcagcggtttccctggcagcaaattattcaaatatcctttttatggtgtataacggactgggtacaggtgcagcattgctatgtacccagtattttggaagaaataatatagaagcgatccatattatcgagggaattgctctccgtttttctataatcatttcggcacttacgtcagtgatcgcatttacgatgcctgggcgtatgatgatgctgtttacaacagatcaggagctgatatcaataggggcttcctatcttcagatcatggggatcacttatctgtgctggagcataacagagatgtatattgcagtgcttcgaagcattggaagagtgacagtatgtatgatcttaaatatattggcatttaccctgaatgtgctgctgaatgcggtatttatctttggattgtttggagttccgcaaatgggggcaacaggagttgcgattgcgacagcagtgtcacggtcagcagaactggcagcgtgtgtggttgtttctgctttcagcagggatgtgaaactgagccttgcatacatgtttgccaaaaatcaggcattgtatacggattttatcaaaatgtcattgcctgctttgggaaatgatgtgtcatggagtgttgcgttctccatgtattctgttattttaggacatttgggaacggacgcagtagcagcgaattccattgtttcagtggtgcgtaacattggaacggtattttgtttttccgtggcgagtgcgggaagtatcctgctgggaagcatgatgggaaaaggagatttggaaaagtcaaaattacatgcattgaaaacattgaaggcgacagtgatcgccggagcagttggaggaatgatcgtccttgcagtgacaccctttgtacttgagtttgcaaccctgaatgataaagcaatgcattacctgaaatacatgttgtttatcaatgcatattatatcatgggagcagcggtcaatagcgttctgattgcaggagtattcagggctgggggagacactaagtttggtctggtctgcgacacgattgacatgtggctgtatgcagtgccacttggttttattgccgcttttatattaaagcttcctgttatgtgggtatattttttgctgtgcacggacgagtttgcaaaatggccatgggtgatacatcactaccgcagtggaaagtgggcacagaatatcacaagagaggatgtatttgcagaaaaagctgtattcttgagccatacagatataaaatagaaggcgatgatataaaatgcggatgagataaaggtatgtatagaatagggattgatttaggtggaactaatatgaaagccggaatcgtggatgaaaatcacaagattgtgatacaggattccataccgacaagagtggagcatccatataaggaaattatacgggatatgacggaactggtaaaagatttattaaaaaagatacatataacagaggagaaactttcaggtataggagttggaagtccgggaactgtagatgccaagaatggtatcgtgttatattcaaataattttaactgggaaaatataccgcttgcagaggaactgggaaaatattttgcatgtaagatcagaatttccaatgatgcaaattgtgcagcactcggagaggtaatggctggagctgcaataaaaataaagaatgctgtgctggtcacacaagcctgatttttggaggagaacgctgtacctgtggcagaagaggatgcgcagaggcatatgtttctgctaccgctctgatcagagaagcaaaatttgctgcaaaaaacaatcctgattccattatgaatgaattatgcaagggagatctttcgaacatgaatggtaaagttccatttgatgcagcagagcagaatgatgcagcagggatcaaagttgtgaatgactatatcatttatctgggtgagacaatcacaaattatgtgaatatcttccgtccggacatagtattgttatcagggggtgtatgcaatcaaaaagagaagcttacggagccattgacggaatatataaagacccagtgctttggaagagagagggcatttgtgcctgaagtacggtgtgcaattttagaaaataatgccggtattattggtgctgccagtttgatcgcactcgtatcttaatcgggataattgagccgtctgcacaatgctggcatatgagaatcagctgtttatatgccagacactttaaaccatcagttgaatgacataatctgccatccggtgtatgcttagtgaaggaaaatagacatttattgaaaccatttttcattcagatataataggaggattacattatggaactgacattgggagactttttagagattatgtcagcaagtgaagcattgggaatccgcgtgtgcgagaaagaagaataaaatactggcggatttattcaaaaggtgctagaatgcaactactacatattaaaacggcagataaataagggggaagtacttatgaaaccaatttatctatccatccagcaacaagaaacaggagcaaacattcggagattgttgaaaatcaatgggtatacggtgaaagatgttcaggaagtcatgggatttgagaatccacaggctgtctataaatggctttccgggaaatcgctgccaaatctcgaaaacctcctgatcttaagcaaattattgaatatcggtattgagaatatcctcgtcattgacgaggatattaatcttttatggagaattactatgcaagggatattgaattggataaatgatgttttggtgctgcaaaatggaatccgcaattatcgaatcagataagcgattatcgaaacagatgtgcaattatcgaaacagatgagcgtttatcgaagaaaacggtgacaaaatacgaaatatcgaaggagcccgtgacaaaatctaaaatatcgaaggaaacggagtcattttgaagaatatcgaaaaaaacggtgtcaaaatttcatgtggcggcagacaggaaatccaattataat

SEQ ID NO: 553 - DNA, 1214 bp, Ruminococcus gnavus
  source 1..1214: mol_type = genomic DNA
ttcatcaattcctaagcttcggtagtgtgtttcagccccggacattttcggcgcaggacctctcgactagtgagctattacgcactcttttaatggatggctgcttctaagccaacatcctagttgtcttcgaaatcccacatccttttccacttaacacacattttgggaccttagctgtaggtctgggctctttcccttttgactacccaacttatctcggatagtctgactcccatgcaccatctacacggcattcggagtttgatatcccttggtaagctttgacgcccccttaggaattcagtgctctacctccgtaagacttgcatgaggctagccctaaagctatttcgaggagaaccagctatctccgggttcgattggaatttctcccctatccacacctcatccccacccttttcaacggatgtgggttcggtcctccattgccttttacggcaacttcaacctggacatggatagatcacccggtttcgggtctactccgactgactatttcgccctgttcagacttggtttcccttcggctccaggccttcagcccttaacctcgccagccagcgtaactcgccggaccgttctacaaaaagtacgcggttcatcatataaagatgttccacagcttgtaaacatatggtttcaggttctctttcactcccctcccggggtccttttcacctttccttcacagtactatgcgctatcggtcactaaggagtatttagccttacggggtggtccccgcgcgttcccacaaggtttcacgtgtctcgtggtactctggatcctgccatgcttgcttgcctttcgtgtacggggctttcaccctctctggctggctttcccaaaaccattctactaggctcactcgtcaattctgcagtccgaaccccggagtgcacgcactccggtttgggctcttccgcgttcgctcgccgctacttacggaatcacatgttgttttctcttcctccggctacttagatgtttcagttcaccgggttcccttccacagcttatggattgggctgtggatacttgaggttttctcaagtaggtttccccattcagagatctccggatcaatggatatttgctcctccccgaagcttttcgcagcttatcacgtctttcatcggctcttagtgccaaggcatccaccatacgctcttattagcataaccaactga

SEQ ID NO: 554 - DNA, 850 bp, Ruminococcus gnavus
  source 1..850: mol_type = genomic DNA
cctcatacagggggataacagttggaaacggctgctaataccgcataagcgcacagtaccgcatggtaccgtgtgaaaaactccggtggtatgagatggacccgcgtctgattagctagttggtggggtaacggcctaccaaggcgacgatcagtagccgacctgagagggtgaccggccacattgggactgagacacggcccaaactcctacgggaggcagcagtggggaatattgcacaatgggggaaaccctgatgcagcgacgccgcgtgagcgatgaagtatttcggtatgtaaagctctatcagcagggaagaaaatgacggtacctgactaagaagccccggctaactacgtgccagcagccgcggtaatacgtagggggcaagcgttatccggatttactgggtgtaaagggagcgtagacggcatggcaagccagatgtgaaagcccggggctcaaccccgggactgcatttggaactgtcaggctagagtgtcggagaggaaagcggaattcctagtgtagcggtgaaatgcgtagatattaggaggaacaccagtggcgaaggcggctttctggacgatgactgacgttgaggctcgaaagcgtggggagcaaacaggattagataccctggtagtccacgccgtaaacgatgaatactaggtgtcgggtggcaaagccattcggtgccgcagcaaacgcaataagtattccacctggggagtacgttcgcaagaatgaaactcaaaggaattgacggggacccgcacaagcggtggagcatgtggtttaattcgaagcaacgcgaagaaccttacctggtcttgacatccctctgacc

SEQ ID NO: 555 - DNA, 770 bp, Ruminococcus gnavus
  source 1..770: mol_type = genomic DNA
cacttccacctctgccctatctacctcgtcgtcttcaaggggtcttactaacttgacgttatgggatatctcatcttgaggggggcttcacgcttagatgccttcagcgtttatcccgtcccggcttggctactctgctatgcatttggtaatacaacagatccaccagcggccagtccaccccggtcctctcgtactaagggcagctcctctcaaatatcctacgcccacgccggatagggaccgaactgtctcacgacgttctgaacccagctcgcgtaccgctttaatgggcgaacagcccaacccttgggacctacttcagccccaggatgcgatgagccgacatcgaggtgccaaaccactccgtcgatgtgaactcttgggagtgataagcctgttatccccagggtagcttttatccgttgagcgatggcaatcccactttataccaccggatcactaagtcctactttcgtacctgctccacccgtcggtgtcgcagtcaagctcccttctgcctttgcactcttcgaatggtttccaaccattctgagggaacctttgagcgcctccgataccctttcggaggcgaccgccccagtcaaactccccacctgacattgtcccccagccggttcacggctgctggttagaaatccaatactacaagggtggtatcccaacagtgactccctgacaactggcgtcatcagttctcagtctcccacctatcctgtacatgcaatatcgaatcccagtatcaagct

SEQ ID NO: 556 - DNA, 669 bp, Ruminococcus gnavus
  source 1..669: mol_type = genomic DNA
tacatatactgttgctgttcatacagcctgatgatggtaagatataggccgatatccttacctgtcatggcgtatccatcactcatgaactgttccagatagccaagatctcttttcacgtagccaagctgtctgcggagtgcgctgcggattttctttgccgtgtgctttctgctcttggcaaatgcaagatactcttttctggcacgtttgcggtatcttcttggcaacttaagaccataacatttacaaaaacagtaaatcatgttttccagcttttctcttgcttcgttcaaaagcgagatgtcctgcggataacgtatgtttgcaggtgcgcaggttgcatcaagtgtcagagtccctttgtttgtatcttcttttgcagtaccatcatcaccggattttcctacggatggaggagtatggtcatctttgtcatcctccttgtgagcaagaagatactcatttacttccatcagcatatctgctgaaatgcgtttacggaaaagaaccagtgtacttgcatcaaacggagcttcttcccgaaaaccgggaagcccgataaagtattgcagatacggattctcagcgatctgttccacaagctcacggtcggaaaattggaacttggtctggatgatcagggctcctaatgccatgcgaagaggc

SEQ ID NO: 557 - DNA, 635 bp, Ruminococcus gnavus
  source 1..635: mol_type = genomic DNA
ggggcgttgtgggttatatggaagttcgtatacatcgagaacatcctccatacaagctataaattctgcgtcctctcttgagggaatgcaccagtattcatttttgtgaggtcgaagtttgttttttttaaggctctacggatagcatctttgctaaccggtgtatcaagcactactttggcttctttttccagcagacgcaaagtccatctggaatgaccttctggaacaggaccgcaggcaagttcaataatacgtgcttctgcacgtccatcaaggatacgccttgcattgtcggaattgatatttcttttgaactcggtaaccgcttcaatgccaccggaaaaatatttggtcactgtattcgttacagttgtcaggcaaacaccatttgatcttgcggattgctcatgggttaatactttcccatgagcctcatccaaatcaataataatctggcatctgcttcgaatagttttagatgtattacttttgcgaattatagattttaatgtcttcaattcatcatctgtaagtttaatgacatattttcttggtcttgccatataaatcaccgccgttttcttttattttaacatgaagcggctataatagctataaatatttagttaaat

SEQ ID NO: 558 - DNA, 506 bp, Ruminococcus gnavus
  source 1..506: mol_type = genomic DNA
ggaagtatgtgagctggctgccaagaaaagccgctattgtttatgatatacccgtaccgtaaaccgacacaggtggatgaggagagaatcctaaggccgacgggagaagcattgttaaggaactcggcaaaatgactccgtaacttcgggagaaggagtgccatgtaaaagtggccgcagagaattggcccaagcaactgtttagcaaaaacacaggtctatgcaaaaccgaaaggtgaggtatatgggctgacgcctgcccggtgctggaaggttaaggggagaggttagccgtaaggcgaagctttgaacttaagccccagtaaacggcggccgtaactataacggtcctaaggtagcgaaattccttgtcgggtaagttccgacccgcacgaaaggcgtaatgatttgggcactgtctcaacaatgcacccggtgaaattgaaataccagtgaagatgctggttacctgcgccaggacggaaagaccccatggagctttactc

SEQ ID NO: 559 - DNA, 471 bp, Ruminococcus gnavus
  source 1..471: mol_type = genomic DNA
tttgcattcgtagaaccgcttggtggagctcatcatgtaagtgttcgggaacatcggactgcaattgactgggcagaagaaatcaaatatcttgccgatgtcatgtatccagatgtagaaaaaataattcttgtaatggataatcttaatacacataaaccagcatcattgtacaaacgttaccctgctgatgaagccagaagaatcatgaaacggttggagattcactacacaccaaaacatggcagctggcttgatattgcagaaatcgaacttaacgtcatgaccagacaatgtttgaacagaaggattgataatatttcaaatcttcgtaaggaattatcagcatgggaagttgaacgaaataccgtagccgcaaaggtaaactggcaatttcgaacggaggatgcaagaattaaattgaattccttgtatccgacatttactactgcatctgaataagatgcagta

SEQ ID NO: 560 - DNA, 310 bp, Ruminococcus gnavus
  source 1..310: mol_type = genomic DNA
tgggcactctagagagactgccagggataacctggaggaaggtggggatgacgtcaaatcatcatgccccttatgaccagggctacacacgtgctacaatggcgtaaacaaagggaagcgagcccgcgagggggagcaaatcccaaaaataacgtctcagttcggattgtagtctgcaactcgactacatgaagctggaatcgctagtaatcgcgaatcagaatgtcgcggtgaatacgttcccgggtcttgtacacaccgcccgtcacaccatgggagtcagtaacgcccgaagtcagtgacccaaccg

SEQ ID NO: 561 - DNA, 279 bp, Ruminococcus gnavus
  source 1..279: mol_type = genomic DNA
aaggagggagctgccgaaggtgggaccgataactggggtgaagtcgtaacaaggtagccgtatcggaaggtgcggctggatcacctcctttctaaggagaaagaagtagaggaagtaagagctattgtttaattatgagggttctcaagaactcagcctttttggtggcgatgcgctcaggggaaacacccgtacccatcccgaacacgatggttaagacctgagcggccgatggtactgcactggagacggtgtgggagagtaggtggccgccaaaac

SEQ ID NO: 562 - DNA, 262 bp, Ruminococcus gnavus
  source 1..262: mol_type = genomic DNA
gagcatgggatccggttatcaggtccaaagctgggcagaccaagcgccacagcaaaagttgataaaaaacaagagtatcaggataataccgatagaatcgaagtggagcgcaccttcagcctgagcaaacgctgttatggtatgagctgcattaccacaaaactggaagaaacgcagttgacatctatcgcattatctgtattcgtgacgaatctgttcaggattcagaggcgaatactttgtgctcttttgcatctgttcc

SEQ ID NO: 563 - DNA, 210 bp, Ruminococcus gnavus
  source 1..210: mol_type = genomic DNA
tggcaacattacccgtatcacttggaaacagcttggcatattttacttcgaattcatcccatgggattcggtcagccagtctgacccagcggttatccggattcatgtggagtcccataggttggttgaaatcgaggaatgaatgctgtaacttgtcgatcggtttgtacattgttttagcccctttatacttaaaatctgtaagaaaac

SEQ ID NO: 564 - DNA, 188 bp, Ruminococcus gnavus
  source 1..188: mol_type = genomic DNA
ttgcaataactcctgttttccctggtccggtatatctgatctgccaggacacgttctggataataaccggtacgctctttgaagcgttctattgcttcaatcaggcaggtgctctcgttgtatgcctcgaaagatattttttcgaggcgcccataaccttcgctgtcaagactgagatcaaattttgc

SEQ ID NO: 565 - DNA, 173 bp, Ruminococcus gnavus
  source 1..173: mol_type = genomic DNA
aacaggatgcgagagcagatcgctgtacaaagtgaaaaaagttcttgacaaagagaagtcaatgtgataatctaaataggctgacttgtgagggagaaaaaatccggaacagacagcgaaaagaaaaataaaaaagttcttgacaagtgagaaacggcgtgataaaatatcag

SEQ ID NO: 566 - DNA, 163 bp, Ruminococcus gnavus
  source 1..163: mol_type = genomic DNA
taagaagagagaatgccggaatgagtagcgagaggaaggtgagaatccttccggccgaatatctaaggtttccagagtaaagctgatctgctctgggtaagtcggggcctaaggcgaggtcgaaagacgtagtcgatggataacaggtaaagattcctgtact

SEQ ID NO: 567 - DNA, 136 bp, Ruminococcus gnavus
  source 1..136: mol_type = genomic DNA
ataatgttgttaacattacctcggatgtcttgttgaattttattcaactctcttattttcataagatatttctctttgtatgcaattttcaaggtacatctgactgcttctttcatcagtcatcagaaactaaaat

SEQ ID NO: 568 - DNA, 134 bp, Ruminococcus gnavus
  source 1..134: mol_type = genomic DNA
gcttcgctcgacttgcatgtgttaagcacgccgccagcgttcatcctgagccaggatcaaactctcgttaaaagtgttcgttccggtcagaattaactactagctaattcatcccttttactgtctgtcacatt

SEQ ID NO: 569 - DNA, 128 bp, Ruminococcus gnavus
  source 1..128: mol_type = genomic DNA
ctctttaatcggagctttccttcgggacagaggagacaggtggtgcatggttgtcgtcagctcgtgtcgtgagatgttgggttaagtcccgcaacgagcgcaacccctatctttagtagccagcattt

SEQ ID NO: 570 - DNA, 127 bp, Ruminococcus gnavus
  source 1..127: mol_type = genomic DNA
ccacagtggcccttgggcttattcttttcatcggtctgtctcagcgacaagtggtatcttatcacgggaaaagtgaattgtcaatgttttttctgttttttatttttttcgcacaattcagacaatt

SEQ ID NO: 571 - DNA, 121 bp, Ruminococcus gnavus
  source 1..121: mol_type = genomic DNA
tgtttgtatggacgaaaaaccatatcagttacttggcgaggcaagatccccacttcctatgcgccccggcaatgaccagaaagtagattctgagtatgtcagaaatggtacatgcagcatc

SEQ ID NO: 572 - DNA, 119 bp, Ruminococcus gnavus
  source 1..119: mol_type = genomic DNA
ctcatgtgacgggtgcatctcttagatgctgttcttaaaaaatcttctcttaagaaattttcaaggttgttgtctattgtttaattatcaaggttcttcgctgttcttgttgataagaa

SEQ ID NO: 573 - DNA, 107 bp, Ruminococcus gnavus
  source 1..107: mol_type = genomic DNA
tgcaagaaaaacgatttgtttttgtcaaaatccttgcaatcattataccagaaaatggggcaaaagtcagtaaaatcaagtgttttcagtttgctcagcagacacta

SEQ ID NO: 574 - DNA, 103 bp, Ruminococcus gnavus
  source 1..103: mol_type = genomic DNA
cgataacagaatccattctgtggagcatcgcattgtaagcatttcgcagccatggcttcggccgattgtcagagggaaggtcaaagcacctgttgaatttggc
